United States Patent Application Publication US 2025/0311689 A1 - sequence listing, part 2

SEQ ID NO: 264 - DNA, 21819 bp, synthetic construct
  misc_feature 1..21819: note = PHP99677
  source 1..21819: mol_type = other DNA
gtttacccgccaatatatcctgtcaaacactgatagtttaaactgaaggcgggaaacgacaatctgatcatgagcggagaattaagggagtcacgttatgacccccgccgatgacgcgggacaagccgttttacgtttggaactgacagaaccgcaacgttgaaggagccactcagcaagctggtacgattgtaatacgactcactatagggcgaattgagcgctgtttaaacgctcttcaactggaagagcggttacgctgtttaaacgctcttcaactggaagagcggttactaccggttcactagctagctgctaatcgagctagttaccctatgaggtgacatgaagcgctcacggttactatgacggttagcttcacgactgttggtggcagtagcgtacgacttagctatagttccggacttacccttaagcgatttaaatctgcggttaccgaattcgagctcggtacctagtacccttgtacttttggtttcacctgcatagagaaaacccacaagaatatgacagtctgatttgtcagtctcattctcaagcaacatttctctatccgttactttcatggtgaataacacaatccatcatcaatactttgtgttactcagaaactgaaagttattccgagtcttgcatatctttggacctactcgtttttctaccattattgctgattgttaagctctcgctacttgaatcggcattgttggagtgggaaggttcaaaaaattggagttatgactagttgtctctttctatgtacgatggagaaaatgaataaacaactgagaaaatggctcttgtttagttgatgatgctcttaagctttccactggttgccatatatgatttgggcatttcactttgatcttaatgggccttgtaaagcccaagactcatgattatctttagttgatgctcttaattaggtgtgggcaaataattcaaactgtatgtacccgaccaaaaccaaagcaaaaataatcgaaccaaaccgaaaatttaaaaataaccgaatgaaaactaaatcctataactgaaagaactgaaaccgaatcaaaatatttaatgtaaccaaaaatatccgaaatataattatattgtcaaaaatattaataatttctagattaaataattaaaaatacttaaaaatttatataaaatagtaaaaatactcgaaaataaccacaaatattcaaaaacaaccgaaatatcccaaaatattcaaagcaaaataaccgaatggataccaaattttaaaaccgaaaaaactggaacaaaaccaaaatcgaaccaaaatttcaaaaatcgaataaatactaaactttagaacaaaaaaaaacgataaccgaatgtatacgaaccaaagccgaattagataaccgaacgtccaggactactcttaatctttccgccacttatgatttgggctattactttgtttataatgagccttttcaagctcaagttcatgattgtccgtgagatgagaaactgacttgttggattcgaaaccctagctagtattggttaatacttaatacataaatgacctgcattgacatcatcatccaagaaaataaaaattgtatgcttgagatatttagttttcctagctaggttttctttattttagtaccgaatctttaggtgtgccacgttaatttagacccattttttcatacttaccaactgagtctagtttaatcatgactataatcgtataaaatgattcagtcgacgtcattgcgaacgtatataaaatcatccaaattgacgtcattccaaagaggtaagcatgcttatctaagagtccgagcatactaaacaagacgacattttatttgcactccaaatcaaattttgtattgcctaaagaaaaacaatcaaactcaagtttcttaaaattaatttcattcaaactaatcactttcaatatctcacatattattcatgccatttctatttgtctaaacatgatttaaaaaaaaaagtaaaatacaaagattactatgcaaaaactctataaaaaaaaattcaaatttcttatttatttgtgacatcaaattttcaaaataatttttttaattatcggttgatccggtcagtcgataaaaacataaactttcagcgaccgttaaaactttcctactaccgatttagagaaaatcttagcttgaaacgtaattgtaacctgccttcatgcaagtcgcaagatatgtcatcctaagttgtatatgttttctcaaaagatgtatttacttgagaaaatacgtttcaacgttgatggacaaccaattaagaatcaagcacctttcgtaatcaatttaggcttatcgtctaaggtatactgatttacgacagttgactagacttataaggaacaaaataatagaatagtttctaaacacttcacctaatcatagagactaagatggtaattcgtaaacgacaaagcctagtgacactgtccattgtaaaattccacatcatattagtattaaacatatacatgtagtttcctgaacacatgtagtatcaaacacacttcgtggcttcttcctcgaaacctgcggccgcgctatagttccggacttacccttaagataacttcgtatagcatacattatacgaagttatgggcccacgcgtgaagagcggttaccagagctggtcacctttgtccaccaagatggaactgtcttcggccagaatggccatctggattcagcaggcctagaaggccatttatcgctatcaactttgtatagaaaagttgggccgaattcgagctcggtacggccagaatggcccggaccgaagcttgcggccgcacactgatagtttaaactgaaggcgggaaacgacaatctgatcatgagcggagaattaagggagtcacgttatgacccccgccgatgacgcgggacaagccgttttacgtttggaactgacagaaccgcaacgttgaaggagccactcagccgcgggtttctggagtttaatgagctaagcacatacgtcagaaaccattattgcgcgttcaaaagtcgcctaaggtcactatcagctagcaaatatttcttgtcaaaaatgctccactgacgttccataaattcccctcggtatccaattagagtctcatattcactctcccgggggatctcgactctagaggatcgctcaggaaggccgctgagatagaggcatggcggccaatgcgggcggcggtggagcgggaggaggcagcggcagcggcagcgtggctgcgccggcggtgtgccgccccagcggctcgcggtggacgccgacgccggagcagatcaggatgctgaaggagctctactacggctgcggcatccggtcgcccagctcggagcagatccagcgcatcaccgccatgctgcggcagcacggcaagatcgagggcaagaacgtcttctactggttccagaaccacaaggcccgcgagcgccagaagcgccgcctcaccagcctcgacgtcaacgtgcccgccgccggcgcggccgacgccaccaccagccaactcggcgtcctctcgctgtcgtcgccgccgccttcaggcgcggcgcctccctcgcccaccctcggcttctacgccgccggcaatggcggcggatcggctgtgctgctggacacgagttccgactggggcagcagcggcgctgccatggccaccgagacatgcttcctgcaggactacatgggcgtgacggacacgggcagctcgtcgcagtggccacgcttctcgtcgtcggacacgataatggcggcggccgcggcgcgggcggcgacgacgcgggcgcccgagacgctccctctcttcccgacctgcggcgacgacggcggcagcggtagcagcagctacttgccgttctggggtgccgcgtccacaactgccggcgccacttcttccgttgcgatccagcagcaacaccagctgcaggagcagtacagcttttacagcaacagcaacagcacccagctggccggcaccggcaaccaagacgtatcggcaacagcagcagcagccgccgccctggagctgagcctcagctcatggtgctccccttaccctgctgcagggagtatgtgagagcaacgcgagctgccactgctcttcactgatgtctctggaatggaaggaggaggaagtgagcatagcgttggtgcgttgctgtcaagggcgaattcacatggttaacctagacttgtccatcttctggattggccaacttaattaatgtatgaaataaaaggatgcacacatagtgacatgctaatcactataatgtgggcatcaaagttgtgtgttatgtgtaattactagttatctgaataaaagagaaagagatcatccatatttcttatcctaaatgaatgtcacgtgtctttataattctttgatgaaccagatgcatttcattaaccaaatccatatacatataaatattaatcatatataattaatatcaattgggttagcaaaacaaatctagtctaggtgtgttttgcgaatgcggccgccaccgcggtggagctcgaattccggtccgggcctagaaggccagcttcaagtttgtacaaaaaagcaggctccggccagaatggcccggaccgggttaccgaattcgagctcggtaccatttaaattataatcagtacgaactatctgacaactatccggtacctatccgagtagtatctgttatccgtttcttacccgcccgggttattacccggtcccgtcttgtatccattccgaatcttaactacccgtatccggcctcgtatccgagacacatgcattagagtagaatacatgatgactcggtatccggctgtatctgtcccgttttcatccctagttatcctaccaaatttgagaaaatgactcatgatgcattatctcattttagatggagtgatttctcaaacaaacacccccttagatagtcaaagtgactattcaagtttcctcttccgggttactctattgttcgtcaaaatgactattcaaaccaaacactctctaaatgtaacaagtgactggataggctatagccgagggtgttcgtctagtagagggtttgtttggaattcgttttttttgtatttccgtgttttcctgcgaaattaaattggttcatataaaattcctacatggcttctaagaagctattatattttgaatcggtcttagctccaaaggagcaaaccctatttctccacctagcattacctcgtcctagctcttgaaatgctcaagtagtcaagtgtttacatgtagtgcagtcaatgtcaaggtaacgcaataaactaaggccatgttcattccacctaggattatataattcagcttatagattatataatcaccaaataacctatttatggattattatagatatctaaattatataatccacataataatgcgtgttgtttattttcctcttaacttatttaagttggattatataatcttgagggtaaataaacatggcctaaatttactacaacatggatagtagttagagacatttgtttttaaaccatgaaaaaaccctataaacttctaaaaagttctgctaaaattctaaatacaaattaatatacaacttcaaaaaaatgttcaaaggtcatatctccagcacttctaaaaatcatttatttagaaaaataaaaaacatagaaaaattacaaatcattctaattgatgccgtaatgtgtttcaaaaactttctacaacaaaagcttaaacacaaccatcaaaaatgtatgagacattaatgtatttcacgctattgactattgcatatatttgtcgtgtaaagttttatagcccatttatacatcaattataatgattttaatttttctagatttcttttgtacaattttctatttttctatagctaaataattttaacaaaatttctagtgatatttctattttttttatttttgtacacctagatttgtagaaagttagagacattgtttatagtttaaaaattgaaaaaatatttactgtatttttactaacgggtgaagtcgcatccaaaaccacttcagtccatggcaagaggtattttactaacggacggacatggcccagacatccggaagaggcccaagggcccataacgtccgtacccgcatccgacggttccaagcctaacacgcgtcatccatcgggagctcgctctagggttttgcttcgagaccgttcccacttcccatcgctcatataacaccgggcgccgccgcttccgtcctcttcctctcgctccgttgctcgcctcgggtcaaaccctaagcaggtacgcttccttgtgcgacggccatctcctcttgcggacggctcgatttctcaatctgttgtctatttcactgtatctgacctttctttgttttatttttgttgttgtttcttccacagggagttgatttatccgctgcagccggatccatggccactgtgaacaactggctcgctttctccctctccccgcaggagctgccgccctcccagacgacggactccacactcatctcggccgccaccgccgaccatgtctccggcgatgtctgcttcaacatcccccaagattggagcatgaggggatcagagctttcggcgctcgtcgcggagccgaagctggaggacttcctcggcggcatctccttctccgagcagcatcacaaggccaactgcaacatgatacccagcactagcagcacagtttgctacgcgagctcaggtgctagcaccggctaccatcaccagctgtaccaccagcccaccagctcagcgctccacttcgcggactccgtaatggtggcttcctcggccggtgtccacgacggcggtgccatgctcagcgcggccgccgctaacggtgtcgctggcgctgccagtgccaacggcggcggcatcgggctgtccatgattaagaactggctgcggagccaaccggcgcccatgcagccgagggtggcggcggctgagggcgcgcaggggctctctttgtccatgaacatggcggggacgacccaaggcgctgctggcatgccacttctcgctggagagcgcgcacgggcgcccgagagtgtatcgacgtcagcacagggtggagccgtcgtcgtcacggcgccgaaggaggatagcggtggcagcggtgttgccggcgctctagtagccgtgagcacggacacgggtggcagcggcggcgcgtcggctgacaacacggcaaggaagacggtggacacgttcgggcagcgcacgtcgatttaccgtggcgtgacaaggcatagatggactgggagatatgaggcacatctttgggataacagttgcagaagggaagggcaaactcgtaagggtcgtcaagtctatttaggtggctatgataaagaggagaaagctgctagggcttatgatcttgctgctctgaagtactggggtgccacaacaacaacaaattttccagtgagtaactacgaaaaggagctcgaggacatgaagcacatgacaaggcaggagtttgtagcgtctctgagaaggaagagcagtggtttctccagaggtgcatccatttacaggggagtgactaggcatcaccaacatggaagatggcaagcacggattggacgagttgcagggaacaaggatctttacttgggcaccttcagcacccaggaggaggcagcggaggcgtacgacatcgcggcgatcaagttccgcggcctcaacgccgtcaccaacttcgacatgagccgctacgacgtgaagagcatcctggacagcagcgccctccccatcggcagcgccgccaagcgcctcaaggaggccgaggccgcagcgtccgcgcagcaccaccacgccggcgtggtgagctacgacgtcggccgcatcgcctcgcagctcggcgacggcggagccctggcggcggcgtacggcgcgcactaccacggcgccgcctggccgaccatcgcgttccagccgggcgccgccagcacaggcctgtaccacccgtacgcgcagcagccaatgcgcggcggcgggtggtgcaagcaggagcaggaccacgcggtgatcgcggccgcgcacagcctgcaggacctccaccacctgaacctgggcgcggccggcgcgcacgactttttctcggcagggcagcaggccgccgccgctgcgatgcacggcctgggtagcatcgacagtgcgtcgctcgagcacagcaccggctccaactccgtcgtctacaacggcggggtcggcgacagcaacggcgccagcgccgtcggcggcagtggcggtggctacatgatgccgatgagcgctgccggagcaaccactacatcggcaatggtgagccacgagcaggtgcatgcacgggcctacgacgaagccaagcaggctgctcagatggggtacgagagctacctggtgaacgcggagaacaatggtggcggaaggatgtctgcatgggggactgtcgtgtctgcagccgcggcggcagcagcaagcagcaacgacaacatggccgccgacgtcgggcatggcggcgcgcagctcttcagtgtctggaacgacacttaagcgtacgtgccggcctggctctccgaaagggcgtattccagcacactggcggccgttactagacccaacctagacttgtccatcttctggattggccaacttaattaatgtatgaaataaaaggatgcacacatagtgacatgctaatcactataatgtgggcatcaaagttgtgtgttatgtgtaattactagttatctgaataaaagagaaagagatcatccatatttcttatcctaaatgaatgtcacgtgtctttataattctttgatgaaccagatgcatttcattaaccaaatccatatacatataaatattaatcatatataattaatatcaattgggttagcaaaacaaatctagtctaggtgtgttttgcgaatgcggcctccgggcacccagctttcttgtacaaagtggccgttaacggatcggccagaatggcccggaccgggttaccccgcggttcaaagccaatgactgttgttaggtccagtttctaaggacgaatcatccaatcactggttctttctgaacaaaacaaagagctatagagttacgttactgtagccgagacagagcctgcaatctggttatgccacatactaggttctttcttaaagttgactcactctatcctaagttctacttacaaggagctacaacaaattggtcataaccggagagcgttcaaggaggtaatatcccatcttactctgtagcaaggctacaaaaggagagctaaagaactaggctacaaaaagagagctaaagaactaactatctagcaagactacagagctatagtgtagagatttcataaccggtgagcgttcaaggatactttgaagagaagaggtaatatctcaactagcaagactacaaaaaaatggagatataaaactaactgtctaacaagactacagagctatagtagagatagatacgttcgacacttaagcatgagaattcgagctcggtaccctggttcacaaactcaatacaacacacagtggagtagggtattacgctccggcggcccgaaccactctaaatccttgtgtcctcgtgtgctcttccaccattaatgactgtaattgcagggacacgaagagttgtagcgcttttgccaacaagatccgctatatgctagtagagtggaacctgcacagcaacaagcatccaataatctgagaataagaattatgtgtggtgatggttctcatctctgcaactcgccattttcgcgagagaaccaaatccaagttggtgaagatcatgatttgggctcatgggctggcatagtagctattacctttgcaattgtggttcgaatctatccgatattctccttttcagggagagctaatgcttatgcttattgggtattttggtttgacactgcttcacgcccaaaaaaaggcaactatgtctgagttggatatggcccaaaaaaaggcagctatgtctgagttggatatggaagtcttctttcgtttagggtgaagtaagaccaagctcatgagcttattatcttaggtcggaacaaattagttgataggcatggcacatttatcaaattataatgattttaacagaaaagcaacacctctttttcagcagcaccagctttgcaagctgcaattgacactccaagcatagtatttgctccaaactcagcctgcatttcgcacaatatcatatctatttccatttggataaaatatattttccagaaatatgggaacagaatcaagatacagaaaaaagttgtggtagtagtggtaagtggaaacacaagtacagtgaaaagatagcattatttctgaacagtcaaattaaccgaaataagtagtatcacatactgcccctaaattgactacacccaatgtaaagaattgcttgagcatattgagccatcagttgtttgtttgtgtaacggatttgacaatgcagagttcaggagcaaaaaaccgcaaaggagagaaagagggaaaggatctcctagtatcccaccttgtggcgcgccctgtcaagtgcatgatggcctggtcgatctgcgtctgctgctgcggttccatcccaacgagtgcctccgacaccttgtcgttgatcacccgcaccgcgtaggcgacccccctggcgaggaacttccgcctctcggaggccccggccgcgtcggcggcggcgccctcgagcgcgcccacgctagccgtagatgctcggtgcacggccttgttggtgtgcaactcgacctcaacggccggtgcgctacgcccgtcaaggatctggcgcgcccgcaccctcgtgatcacggtgggcgcctcccgcctcatgtggccgacgatgaaaagcgccgggttaggggccttggcgcgcaccgccgtattcagggcctcctcgctcttgcgcgagagcaggtgcttccccaggtactcctgcactgacaaggctgccacagcggtggaatttgtcctcacgacttcgccacgtcgtcctcacctccctggcttcccacgactccgccgtatcgaggtgctcggtgggtcgtcttaatccgaagtccgaactaggaagacgagacagagaggtctgaggaatgggcctcgtttgatgttgagctgaattatttttccagcataagcccaggtcttggtccatgaacaaaattactagaaacccagcccagtactacgatctaaaagagggactgccactggatagctctctctagcattctccacgctccaatacagcggcgtcgtgtctatccgggtctatccgcgaacacgtgagaactctccagaaactgctttctcctccacttcatctctctcgctttccctctataaaaagaccccttctaggaattgagggagacagcaagcaccaagcagcgatccgaagctcaatcaattcactcaaacctcttccccaaatcttcgattagatcttcgttgacaagaagactagaaccgaacctgacatgtccaacctgctcacggttcaccagaaccttccggctcttccagtggacgcgacgtccgatgaagtcaggaagaacctcatggacatgttccgcgacaggcaagcgttcagcgagcacacctggaagatgctgctctccgtctgccgctcctgggctgcatggtgcaagctgaacaacaggaagtggttccccgctgagcccgaggacgtgagggattaccttctgtacctgcaagcgcgaggtttgtttctgcttctacctttgatatatatataataattatcattaattagtagtaatataatatttcaaatatttttttcaaaataaaagaatgtagtatatagcaattgcttttctgtagtttataagtgtgtatattttaatttataacttttctaatatatgaccaaaacatggtgatgcctaggtctggcagtgaagaccatccagcaacaccttggacaactgaacatgcttcacaggcgctccggcctcccgcgccccagcgactcgaacgccgtgagcctcgtcatgcgccgcatcaggaaggaaaacgtcgatgccggcgaaagggcaaagcaggccctcgcgttcgagaggaccgatttcgaccaggtccgcagcctgatggagaacagcgacaggtgccaggacattaggaacctggcgttcctcggaattgcatacaacacgctcctcaggatcgcggaaattgcccgcattcgcgtgaaggacattagccgcaccgacggcggcaggatgcttatccacattggcaggaccaagacgctcgtttccaccgcaggcgtcgaaaaggccctcagcctcggagtgaccaagctcgtcgaacgctggatctccgtgtccggcgtcgcggacgacccaaacaactacctcttctgccgcgtccgcaagaacggggtggctgcccctagcgccaccagccaactcagcacgagggccttggaaggtattttcgaggccacccaccgcctgatctacggcgcgaaggatgacagcggtcaacgctacctcgcatggtccgggcactccgcccgcgttggagctgctagggacatggcccgcgccggtgtttccatccccgaaatcatgcaggcgggtggatggacgaacgtgaacattgtcatgaactacattcgcaaccttgacagcgagacgggcgcaatggttcgcctcctggaagatggtgactgaggtacccaacctagacttgtccatcttctggattggccaacttaattaatgtatgaaataaaaggatgcacacatagtgacatgctaatcactataatgtgggcatcaaagttgtgtgttatgtgtaattactagttatctgaataaaagagaaagagatcatccatatttcttatcctaaatgaatgtcacgtgtctttataattctttgatgaaccagatgcatttcattaaccaaatccatatacatataaatattaatcatatataattaatatcaattgggttagcaaaacaaatctagtctaggtgtgttttgcgatccgatatcgaattggccacggtaccagctgctgctgttctagggttcacaagtctgcctatttgtcttccccaatggagctatggttgtctggtctggtccttggtcgtgtcccgtttcattgtgtactatttacctgtaatgtgtatccttaagtctggtttgatggtgtctgaaacgttttgctgtggtagagcagcatggaagaactataatgaataagtgatccctaatcattgtgtccaaattttgcttctgctatacccttttgtgctgtttcttatgttttgcttaaaaatttgatctgacaaacaaatttgtctaaattatgctcttgttctgactgtgtactgtacacatttgtattgctaccggtttggcacatagttttctctttgattgcagatcaaacccttctgattgcagattgcttggctatggctgatgtgctcactgttcttctttagcttgtatattgctgatggtggcttggctacggctgaaaaagttgctgctgcgccgacttggcaactgttgctccagtaatgctttgtcctctcttcctagccgccgacttggcacttggcagctgttgctcctgtaatgcgttgttatctcttatctcttgagatgtactatgattttgaggctgtttgacttgtgccagattgccagtgctgatgctatattatctcaggtttttatgctagtatatgttttactgtgtgctgcctgtgtcgagttacgtaatctattgaaccgctatgcgtgttgatgccctgttgttgcttgccagattgatgcccctgttgcttgcagcttgcaagctgtagtgaaatcctaaaattccaaaccaaatctattctgaacttttgaagatctgtgatgtccggaagaaaagattcaaacagataaacgggactctccagaatctataaaataaatgatcgacaaacgctttgctttggtaggcttcaagcttggtcacccggtccgggcctagaaggccagcttcggccgccccgggcaactttattatacaaagttgatagataaatcagatatctggttcctaaggacccggcggaccgattaaactgattcggtccgacgcgttacctaataacttcgtatagcatacattatacgaagttattagctaactaactagtaagcttaagccatgggtcgacggatccgttaactagcgtggcatttggcaccgccgcacactatgcgagctaggagtgctagtttacagatgaaactatgaaaccaagaaaacacaattgtccgtagctagcgcgtggcgtcgtgtcaagcttcacacagtatcttcgttcttcactataaatcgcgcctgttgttcgtgagacccaccaccgtggataacagtcccctaataataagcgatcaacagcactgctgatggctgaacaccgaggcgccgccgcgcgtaaccatccgccggagcagcccgtcgtgccggcgaacgacgccttccccgaccgcgcccagcagctctgcctcgacgccgggcgcgcgctcgcgatgtgcggcgtgctcgtcgccgtccctcccgcattttacgcgtcgacgtcgcggacgacaccgcacttgccttcgtcggcttcgtcctctggatcatcggtgcgtggctgtgcctcctggcgctcacgcccttggctccacgggcggtgagggcgggcggggccgccgccagcaccttgctgatcaggtgcctgtccctttcatgaactactagcgcccgcgcccgcggccgccgggcacaagagaacacatcgatgttcgctgcgtacgtcagcaataaggcactctttgtcagtagtcgagtgcatatgttgggtgtttgccctgggagatttcaagtgttgtggccattatcccgcaggataaaaaatcggcggcttttggattgatacggaaaataacgatgtttcatgctcgtgttgtgtgtgtgacatcttgtcagccaagtttttaaccgttgctactccccctctgtgggctcagtgtgtggaccggaatacgtcgtacataggccgtagcctaagcccaatatgccgtttttcaggttggcctgtgtgacgacaagcgggtctcaaaagcccatcacgcaactggcctgcaattattggaggagagcgcgtcgagttggttccagaggctgcgtggtggggccggactctgcgacgacctctcgttcgcgtccgatttggttgccgtgagccgtgacgtaacgcctccttccgttcctccctatataagttccacccccgggtccggtttccccaagccccagtgacccccgatcccgatcgcgaaatctccgcacccgccggcaagggaccgaagcaagcctctctcccgaccgtcgcatcaaggtacgcgtccgctcgatctgtcctcttccttctcgatttgacttgctgtggtgcccgatcacgggatcagaatcgcaccagtgtagatttcgcatgttctaagatgtgttagtttccaggctaatccagttctcttgacgcccgatccgatcgagctccgtgtttatttcagcctaatcgtagtattcccctaaaatttcctcattagggggttcgcaagattgttggtcgacaggttcacttatgctcgatcgcttacttttagtcgattcatgctgcgtactattgttgccccccgtggttttatcttttctcgtgtgaaatccagtagatatagtagatatcgtagcattaggttttaattcaatcgattgattattgtatcatcaaaattgagaagttcgaatcatgcctatcatgctgcctcaaccgaaatcctgtatattgaagtttcaattcaattgattgatcattcattagattcaaccaaaatctagaaggttagatgacgcatgtcatgctgcctgcgtagtttacctttgatctgtttatgattaccttatcagtaggatatttgtgattttgggaagtagcactaactgattcatgctgacatgatgttccctttcagattatactgttgagtcctatctaattgatgctttgtatgctatatgaatacgtcatggtaaattagcagttaattagcatattagcaattgggcgtacctcatcaggattgctcttgtagatgtgtgtggtgatgtttcttgttcaattcatgttctgctttaaaagtatgtgttctctgtttgttaattaagattcatggttataatgatttggacctaattaatcagggttgcccttttagatgcgtggttacttgttgagttcatttttttcctgctatagttgtatgcgtttgttcattcatggttagatttgatttgtttcttctctattccatgccttccatatacttcaattgtagcttaacatgagatttctgtatatgcaggtcgaccgccggggatccacacgacaccatggcccagtccaagcacggcctgaccaaggagatgaccatgaagtaccgcatggagggctgcgtggacggccacaagttcgtgatcaccggcgagggcatcggctaccccttcaagggcaagcaggccatcaacctgtgcgtggtggagggcggccccttgcccttcgccgaggacatcttgtccgccgccttcatgtacggcaaccgcgtgttcaccgagtacccccaggacatcgtcgactacttcaagaactcctgccccgccggctacacctgggaccgctccttcctgttcgaggacggcgccgtgtgcatctgcaacgccgacatcaccgtgagcgtggaggagaactgcatgtaccacgagtccaagttctacggcgtgaacttccccgccgacggccccgtgatgaagaagatgaccgacaactgggagccctcctgcgagaagatcatccccgtgcccaagcagggcatcttgaagggcgacgtgagcatgtacctgctgctgaaggacggtggccgcttgcgctgccagttcgacaccgtgtacaaggccaagtccgtgccccgcaagatgcccgactggcacttcatccagcacaagctgacccgcgaggaccgcagcgacgccaagaaccagaagtggcacctgaccgagcacgccatcgcctccggctccgccttgccctccggactcagatctcgatagagtcaacctagacttgtccatcttctggattggccaacttaattaatgtatgaaataaaaggatgcacacatagtgacatgctaatcactataatgtgggcatcaaagttgtgtgttatgtgtaattactagttatctgaataaaagagaaagagatcatccatatttcttatcctaaatgaatgtcacgtgtctttataattctttgatgaaccagatgcatttcattaaccaaatccatatacatataaatattaatcatatataattaatatcaattgggttagcaaaacaaatctagtctaggtgtgttttgcgaattgcggcgcccttactttaacgcctctaaccaacacccctttatctttataaggaacaataaacagaatttgccccactgttctaaatcacctaataatatccccagctaaaaacaataaaggtttcctagaattaagacaagcatgactgttcctccaggagggtttggaacattgttgcagtcttgcagatacgggcgaagggtgagaaacagagcggagggctggaggtgacctcggtagtcgacgccggagttgagcttgacaacgacggggcggcccctgatggacttgaggaagtccgatggcgtcttcaccgtcccgccggcgcccgaggcgggcctgtcgctgccgccgccgccgctgctcatcttgcgcgctgtgcccccggcggtgtccctgtgttgcggatcgcgggtgggccaggtggatgcgagggcgacccgtttggactccggccggagccgccggatccctggtcggtgtcagtgccgtttactctgggccccacgtgtcagtaccgtctgtagatgacaacaacccgtcgtccacagtcatgtccaaaatatcctttcttcttttttttcgattcggatatctatcttccttttttttttccaaaaatcttcttgacgcaccagcgcgcacgtttgtggtaaacgccgacacgtcggtcccacgtcgatagaccccacccaccagtgagtagcgtgtacgtattcgggggtgacggacgtgtcgccgtcgtcttgctagtcccattcccatctgagccacacatctctgaacaaaaaaaaggagggaggcctccacgcacatccccctccgtgccacccgccccaaaccctcgcgccgcctccgagacagccgccgcaaccatggccaccgccgccgccgcgtctaccgcgctcactggcgccactaccgctgcgcccaaggcgaggcgccgggcgcacctcctggccacccgccgcgccctcgccgcgcccatcaggtgctcagcggcgtcacccgccatgccgatggctcccccggccaccccgctccggccgtggggccccaccgagccccgcaagggtgctgacatcctcgtcgagtccctcgagcgctgcggcgtccgcgacgtcttcgcctaccccggcggcgcgtccatggagatccaccaggcactcacccgctcccccgtcatcgccaaccacctcttccgccacgagcaaggggaggcctttgccgcctccggctacgcgcgctcctcgggccgcgtcggcgtctgcatcgccacctccggccccggcgccaccaacctagtctccgcgctcgccgacgcgctgctcgattccgtccccatggtcgccatcacgggacaggtggcgcgacgcatgattggcaccgacgccttccaggagacgcccatcgtcgaggtcacccgctccatcaccaagcacaactacctggtcctcgacgtcgacgacatcccccgcgtcgtgcaggaggctttcttcctcgcctcctctggtcgaccagggccggtgcttgtcgacatccccaaggacatccagcagcagatggcggtgcctgtctgggacaagcccatgagtctgcctgggtacattgcgcgccttcccaagccccctgcgactgagttgcttgagcaggtgctgcgtcttgttggtgaatcgcggcgccctgttctttatgtgggcggtggctgcgcagcatctggtgaggagttgcgacgctttgtggagctgactggaatcccggtcacaactactcttatgggcctcggcaacttccccagcgacgacccactgtctctgcgcatgctaggtatgcatgggacggtgtatgcaaattatgcagtggataaggccgatctgttgcttgcacttggtgtgcggtttgatgatcgcgtgacagggaagattgaggcttttgcaagcagggctaagattgtgcacgttgatattgatccggctgagattggcaagaacaagcagccacatgtgtccatctgtgcagatgttaagcttgctttgcagggcatgaatgctcttcttgaaggaagcacatcaaagaagagctttgactttggctcatggaacgatgagttggatcagcagaagagggaattcccccttgggtataaaacatctaatgaggagatccagccacaatatgctattcaggttcttgatgagctgacgaaaggcgaggccatcatcggcacaggtgttgggcagcaccagatgtgggcggcacagtactacacttacaagcggccaaggcagtggttgtcttcagctggtcttggggctatgggatttggtttgccggctgctgctggtgcttctgtggcaaacccaggtgtcactgttgttgacatcgatggagatggtagctttctcatgaacgttcaggagctagctatgatccgaattgagaacctcccagtgaaggtctttgtgctaaacaaccagcacctggggatggtggtgcagttggaggacaggttctataaggccaacagagcgcacacatacttgggaaacccagagaatgaaagtgagatatatccagatttcgtgacgatcgccaaagggttcaacattccagcggtccgtgtgacaaagaagaacgaagtccgcgcagcgataaagaagatgctcgagactccagggccgtacctcttggatataatcgtcccacaccaggagcatgtgttgcctatgatccctagtggtggggctttcaaggatatgatcctggatggtgatggcaggactgtgtactgactagctagtcagttaacagatctgccagatcctcggtgtacaaataacccgtcttatcctatgagacgggccggcgtcagtgtgttctggaggaatttttatgtcagagcctttttctttgtgtgcttgatgtagatgccaagggaagcttattggctgttgaagcttgatgcaaaataaattatggaactctgttttttgtttatctaataataactagcaaatatgcttccattgcattgaaactaacagccttttgtgtttccaagttttattttgtgacaatgtcatctatttcaattagttgtggaatcggaaacttgcaggactaacttggaaactccaatccctcagcatcctggactttttcctggtgtaatccatgtagatattattttaatcatcattttagttctggaggtttttccatctccggttttgctcccctttcttcaaaaaaaaaaaaaaaatgccgtaggcgccgcaacgcccacctgttgttcaaactcatgggcacgagtggctcgaagattttatacaacaattgctgtagtttcaccgttgctggtgaagaagcatttttttaaaaaaatatagtggtattcattttaattagtttagttgtgcagcgagcaaaatttggacatgctctgctcggaatctgatcgacctagacacagattagcagcagtagctttgtcatctgttccaagagttgcgatctgatagaagaaaaaaaaaccttcccttcaatgtaaaaccgaaactaacaagaaagaagcacagtgccgtttaggcaagtatggagtacgtattaagcatgtagaaggccatgcatgaaccactaacaagaaagaagcgcagtgccattcaggcaagcataagcatgtagattggcatgcatgaacaactaacagtagatcgtctctggtctgattagaagttttttgggaagccaagaaatcatgtacaactggttccatctcaaattccgtggcaaaaagaggcctaagcaacatacctcgagtagatcacattcaagcttggtcacccggtccgtcaatattctgattccgatgacttcgtaggttcctagctcaagccgctcgtgtccaagcgtcacttacgattagctaatgattacggcatctaggaccgactagtggcgcgccgactagctagctaaggtaccgagctcgaattcattccgattaatcgtggcctcttgctcttcaggatgaagagctatgtttaaacgtgcaagcgctactagacaattcagtacattaaaaacgtccgcaatgtgttattaagttgtctaagcgtcaatttgtttacaccacaatatatcctgcca

SEQ ID NO: 265 - DNA, 21728 bp, synthetic construct
  misc_feature 1..21728: note = PHP99678
  source 1..21728: mol_type = other DNA
gtttacccgccaatatatcctgtcaaacactgatagtttaaactgaaggcgggaaacgacaatctgatcatgagcggagaattaagggagtcacgttatgacccccgccgatgacgcgggacaagccgttttacgtttggaactgacagaaccgcaacgttgaaggagccactcagcaagctggtacgattgtaatacgactcactatagggcgaattgagcgctgtttaaacgctcttcaactggaagagcggttacgctgtttaaacgctcttcaactggaagagcggttactaccggttcactagctagctgctaatcgagctagttaccctatgaggtgacatgaagcgctcacggttactatgacggttagcttcacgactgttggtggcagtagcgtacgacttagctatagttccggacttacccttaagcgatttaaatctgcggttaccgaattcgagctcggtacctagtacccttgtacttttggtttcacctgcatagagaaaacccacaagaatatgacagtctgatttgtcagtctcattctcaagcaacatttctctatccgttactttcatggtgaataacacaatccatcatcaatactttgtgttactcagaaactgaaagttattccgagtcttgcatatctttggacctactcgtttttctaccattattgctgattgttaagctctcgctacttgaatcggcattgttggagtgggaaggttcaaaaaattggagttatgactagttgtctctttctatgtacgatggagaaaatgaataaacaactgagaaaatggctcttgtttagttgatgatgctcttaagctttccactggttgccatatatgatttgggcatttcactttgatcttaatgggccttgtaaagcccaagactcatgattatctttagttgatgctcttaattaggtgtgggcaaataattcaaactgtatgtacccgaccaaaaccaaagcaaaaataatcgaaccaaaccgaaaatttaaaaataaccgaatgaaaactaaatcctataactgaaagaactgaaaccgaatcaaaatatttaatgtaaccaaaaatatccgaaatataattatattgtcaaaaatattaataatttctagattaaataattaaaaatacttaaaaatttatataaaatagtaaaaatactcgaaaataaccacaaatattcaaaaacaaccgaaatatcccaaaatattcaaagcaaaataaccgaatggataccaaattttaaaaccgaaaaaactggaacaaaaccaaaatcgaaccaaaatttcaaaaatcgaataaatactaaactttagaacaaaaaaaaacgataaccgaatgtatacgaaccaaagccgaattagataaccgaacgtccaggactactcttaatctttccgccacttatgatttgggctattactttgtttataatgagccttttcaagctcaagttcatgattgtccgtgagatgagaaactgacttgttggattcgaaaccctagctagtattggttaatacttaatacataaatgacctgcattgacatcatcatccaagaaaataaaaattgtatgcttgagatatttagttttcctagctaggttttctttattttagtaccgaatctttaggtgtgccacgttaatttagacccattttttcatacttaccaactgagtctagtttaatcatgactataatcgtataaaatgattcagtcgacgtcattgcgaacgtatataaaatcatccaaattgacgtcattccaaagaggtaagcatgcttatctaagagtccgagcatactaaacaagacgacattttatttgcactccaaatcaaattttgtattgcctaaagaaaaacaatcaaactcaagtttcttaaaattaatttcattcaaactaatcactttcaatatctcacatattattcatgccatttctatttgtctaaacatgatttaaaaaaaaaagtaaaatacaaagattactatgcaaaaactctataaaaaaaaattcaaatttcttatttatttgtgacatcaaattttcaaaataatttttttaattatcggttgatccggtcagtcgataaaaacataaactttcagcgaccgttaaaactttcctactaccgatttagagaaaatcttagcttgaaacgtaattgtaacctgccttcatgcaagtcgcaagatatgtcatcctaagttgtatatgttttctcaaaagatgtatttacttgagaaaatacgtttcaacgttgatggacaaccaattaagaatcaagcacctttcgtaatcaatttaggcttatcgtctaaggtatactgatttacgacagttgactagacttataaggaacaaaataatagaatagtttctaaacacttcacctaatcatagagactaagatggtaattcgtaaacgacaaagcctagtgacactgtccattgtaaaattccacatcatattagtattaaacatatacatgtagtttcctgaacacatgtagtatcaaacacacttcgtggcttcttcctcgaaacctgcggccgcgctatagttccggacttacccttaagataacttcgtatagcatacattatacgaagttatgggcccacgcgtgaagagcggttaccagagctggtcacctttgtccaccaagatggaactgtcttcggccagaatggccatctggattcagcaggcctagaaggccatttatcgctatcaactttgtatagaaaagttgggccgaattcgagctcggtacggccagaatggcccggaccgaagcttgcggccgcacactgatagtttaaactgaaggcgggaaacgacaatctgatcatgagcggagaattaagggagtcacgttatgacccccgccgatgacgcgggacaagccgttttacgtttggaactgacagaaccgcaacgttgaaggagccactcagccgcgggtttctggagtttaatgagctaagcacatacgtcagaaaccattattgcgcgttcaaaagtcgcctaaggtcactatcagctagcaaatatttcttgtcaaaaatgctccactgacgttccataaattcccctcggtatccaattagagtctcatattcactctcccgggggatctcgactctagaggatcgctcaggaaggccgctgagatagaggcatggcggccaatgcgggcggcggtggagcgggaggaggcagcggcagcggcagcgtggctgcgccggcggtgtgccgccccagcggctcgcggtggacgccgacgccggagcagatcaggatgctgaaggagctctactacggctgcggcatccggtcgcccagctcggagcagatccagcgcatcaccgccatgctgcggcagcacggcaagatcgagggcaagaacgtcttctactggttccagaaccacaaggcccgcgagcgccagaagcgccgcctcaccagcctcgacgtcaacgtgcccgccgccggcgcggccgacgccaccaccagccaactcggcgtcctctcgctgtcgtcgccgccgccttcaggcgcggcgcctccctcgcccaccctcggcttctacgccgccggcaatggcggcggatcggctgtgctgctggacacgagttccgactggggcagcagcggcgctgccatggccaccgagacatgcttcctgcaggactacatgggcgtgacggacacgggcagctcgtcgcagtggccacgcttctcgtcgtcggacacgataatggcggcggccgcggcgcgggcggcgacgacgcgggcgcccgagacgctccctctcttcccgacctgcggcgacgacggcggcagcggtagcagcagctacttgccgttctggggtgccgcgtccacaactgccggcgccacttcttccgttgcgatccagcagcaacaccagctgcaggagcagtacagcttttacagcaacagcaacagcacccagctggccggcaccggcaaccaagacgtatcggcaacagcagcagcagccgccgccctggagctgagcctcagctcatggtgctccccttaccctgctgcagggagtatgtgagagcaacgcgagctgccactgctcttcactgatgtctctggaatggaaggaggaggaagtgagcatagcgttggtgcgttgctgtcaagggcgaattcacatggttaacctagacttgtccatcttctggattggccaacttaattaatgtatgaaataaaaggatgcacacatagtgacatgctaatcactataatgtgggcatcaaagttgtgtgttatgtgtaattactagttatctgaataaaagagaaagagatcatccatatttcttatcctaaatgaatgtcacgtgtctttataattctttgatgaaccagatgcatttcattaaccaaatccatatacatataaatattaatcatatataattaatatcaattgggttagcaaaacaaatctagtctaggtgtgttttgcgaatgcggccgccaccgcggtggagctcgaattccggtccgggcctagaaggccagcttcaagtttgtacaaaaaagcaggctccggccagaatggcccggaccgggttaccgaattcgagctcggtaccatttaaataatcacaaataatattcacaaaaatatatctctaaatagacttgctaccaaaatatatttcgtcacgaatgttagtagattttattttttccgaagtagcagaattcatcagtttgcatataaatgcatcaaggtttgagcactgacgagcattgtattgtgccccctggatctactaacaccaagacgcactaccgcagcagcgcaggagcagacgagggagccagcccagcaggcatgggcgtgcttcggagcacgcaaagccttgaggcggaggtggacgagctgcgcgccgcgctcctggcgggcgggtggcaccgctcggctggccacgcggacgccaagcgcgctccccagggcgatgccagaggggccgcagcgcgcgccgtgtgcgtcactcgcggcatctccttcgtcgggttcgccgtcgtcgaccgcctcctccggcacgggtacaccgtccgcctcgcgttggagacgcaaggtaccaacgtcccgtccgtcctcccccacactaacctacccggctacttctctcgctcgctctgaagctctcgcgcccctcggcccggcctgggacaattggtttgggacaagggtatccggccgcgcggacagaggcaataagtaccaacggaatgtacctgtaggtgcgccagtgctggactcgagagagacagagctgcatccaacgtcggtgcctcccgcggtgcctcgcgccaggctaccagtacttccgcgcccaacaccacgccccaagctggttgatgcacgcccaacgccggtagttctatgcccccgtgatacaccgccgccgcgtccaacgccatgccccaagccgtcacccacgtcaaggctgcagacgtctccttcctcctccatgccgacatggtctacgctcaaatcgaagatgagctcaagccgcaacaacaaatttcggtgctcccaagcttcataaaggctatcttcggcgtcgttgcgatccatggtggcacagaatcgagttgatgttgtagctggcggctagggtttgaagtggagaagaggtccggctggtggcatcctatcgtctattgagggttgggtccggtggcatcatacttgatgacaattgaaagtaattttaatcaacttgtcatgagtagtgagtcttttataaaaaataagctgaaataagcaccctttgatgagcttataggattatcataatctcaaatgctaaattatataattttattagataagttgcttgtttgtttccccactagcttatttacattggattatataatctacataaattataatctcaaacaaaaagtccttaatcagagatcagcgaggtctcacgagtgagaaggcgagagcttgtccaaacgagcattttcgggcgtgtgaacacccatttcagcaaagccgtcgttgtccagttcagcgaagcgcattctgcggctttggcgtgacccattctgctagctcagcactgagaatacgcgtccgctgcagcgttggcgtacaggccggactacattagccaacgcgtatcggcagtggcaaaccctcttcgcttctaactccgctgggccaccagctttgaccgccgcctcccttcccctccgctactgctcctccccaccccactcccccgcaggagcggcggcggcggcggcgaggtcgtaccccacatcggcgagcggcggcggcaccgccggaggcaaaggcaagggatccatggccactgtgaacaactggctcgctttctccctctccccgcaggagctgccgccctcccagacgacggactccacactcatctcggccgccaccgccgaccatgtctccggcgatgtctgcttcaacatcccccaagattggagcatgaggggatcagagctttcggcgctcgtcgcggagccgaagctggaggacttcctcggcggcatctccttctccgagcagcatcacaaggccaactgcaacatgatacccagcactagcagcacagtttgctacgcgagctcaggtgctagcaccggctaccatcaccagctgtaccaccagcccaccagctcagcgctccacttcgcggactccgtaatggtggcttcctcggccggtgtccacgacggcggtgccatgctcagcgcggccgccgctaacggtgtcgctggcgctgccagtgccaacggcggcggcatcgggctgtccatgattaagaactggctgcggagccaaccggcgcccatgcagccgagggtggcggcggctgagggcgcgcaggggctctctttgtccatgaacatggcggggacgacccaaggcgctgctggcatgccacttctcgctggagagcgcgcacgggcgcccgagagtgtatcgacgtcagcacagggtggagccgtcgtcgtcacggcgccgaaggaggatagcggtggcagcggtgttgccggcgctctagtagccgtgagcacggacacgggtggcagcggcggcgcgtcggctgacaacacggcaaggaagacggtggacacgttcgggcagcgcacgtcgatttaccgtggcgtgacaaggcatagatggactgggagatatgaggcacatctttgggataacagttgcagaagggaagggcaaactcgtaagggtcgtcaagtctatttaggtggctatgataaagaggagaaagctgctagggcttatgatcttgctgctctgaagtactggggtgccacaacaacaacaaattttccagtgagtaactacgaaaaggagctcgaggacatgaagcacatgacaaggcaggagtttgtagcgtctctgagaaggaagagcagtggtttctccagaggtgcatccatttacaggggagtgactaggcatcaccaacatggaagatggcaagcacggattggacgagttgcagggaacaaggatctttacttgggcaccttcagcacccaggaggaggcagcggaggcgtacgacatcgcggcgatcaagttccgcggcctcaacgccgtcaccaacttcgacatgagccgctacgacgtgaagagcatcctggacagcagcgccctccccatcggcagcgccgccaagcgcctcaaggaggccgaggccgcagcgtccgcgcagcaccaccacgccggcgtggtgagctacgacgtcggccgcatcgcctcgcagctcggcgacggcggagccctggcggcggcgtacggcgcgcactaccacggcgccgcctggccgaccatcgcgttccagccgggcgccgccagcacaggcctgtaccacccgtacgcgcagcagccaatgcgcggcggcgggtggtgcaagcaggagcaggaccacgcggtgatcgcggccgcgcacagcctgcaggacctccaccacctgaacctgggcgcggccggcgcgcacgactttttctcggcagggcagcaggccgccgccgctgcgatgcacggcctgggtagcatcgacagtgcgtcgctcgagcacagcaccggctccaactccgtcgtctacaacggcggggtcggcgacagcaacggcgccagcgccgtcggcggcagtggcggtggctacatgatgccgatgagcgctgccggagcaaccactacatcggcaatggtgagccacgagcaggtgcatgcacgggcctacgacgaagccaagcaggctgctcagatggggtacgagagctacctggtgaacgcggagaacaatggtggcggaaggatgtctgcatgggggactgtcgtgtctgcagccgcggcggcagcagcaagcagcaacgacaacatggccgccgacgtcgggcatggcggcgcgcagctcttcagtgtctggaacgacacttaagcgtacgtgccggcctggctctccgaaagggcgtattccagcacactggcggccgttactagacccaacctagacttgtccatcttctggattggccaacttaattaatgtatgaaataaaaggatgcacacatagtgacatgctaatcactataatgtgggcatcaaagttgtgtgttatgtgtaattactagttatctgaataaaagagaaagagatcatccatatttcttatcctaaatgaatgtcacgtgtctttataattctttgatgaaccagatgcatttcattaaccaaatccatatacatataaatattaatcatatataattaatatcaattgggttagcaaaacaaatctagtctaggtgtgttttgcgaatgcggcctccgggcacccagctttcttgtacaaagtggccgttaacggatcggccagaatggcccggaccgggttaccccgcggttcaaagccaatgactgttgttaggtccagtttctaaggacgaatcatccaatcactggttctttctgaacaaaacaaagagctatagagttacgttactgtagccgagacagagcctgcaatctggttatgccacatactaggttctttcttaaagttgactcactctatcctaagttctacttacaaggagctacaacaaattggtcataaccggagagcgttcaaggaggtaatatcccatcttactctgtagcaaggctacaaaaggagagctaaagaactaggctacaaaaagagagctaaagaactaactatctagcaagactacagagctatagtgtagagatttcataaccggtgagcgttcaaggatactttgaagagaagaggtaatatctcaactagcaagactacaaaaaaatggagatataaaactaactgtctaacaagactacagagctatagtagagatagatacgttcgacacttaagcatgagaattcgagctcggtaccctggttcacaaactcaatacaacacacagtggagtagggtattacgctccggcggcccgaaccactctaaatccttgtgtcctcgtgtgctcttccaccattaatgactgtaattgcagggacacgaagagttgtagcgcttttgccaacaagatccgctatatgctagtagagtggaacctgcacagcaacaagcatccaataatctgagaataagaattatgtgtggtgatggttctcatctctgcaactcgccattttcgcgagagaaccaaatccaagttggtgaagatcatgatttgggctcatgggctggcatagtagctattacctttgcaattgtggttcgaatctatccgatattctccttttcagggagagctaatgcttatgcttattgggtattttggtttgacactgcttcacgcccaaaaaaaggcaactatgtctgagttggatatggcccaaaaaaaggcagctatgtctgagttggatatggaagtcttctttcgtttagggtgaagtaagaccaagctcatgagcttattatcttaggtcggaacaaattagttgataggcatggcacatttatcaaattataatgattttaacagaaaagcaacacctctttttcagcagcaccagctttgcaagctgcaattgacactccaagcatagtatttgctccaaactcagcctgcatttcgcacaatatcatatctatttccatttggataaaatatattttccagaaatatgggaacagaatcaagatacagaaaaaagttgtggtagtagtggtaagtggaaacacaagtacagtgaaaagatagcattatttctgaacagtcaaattaaccgaaataagtagtatcacatactgcccctaaattgactacacccaatgtaaagaattgcttgagcatattgagccatcagttgtttgtttgtgtaacggatttgacaatgcagagttcaggagcaaaaaaccgcaaaggagagaaagagggaaaggatctcctagtatcccaccttgtggcgcgccctgtcaagtgcatgatggcctggtcgatctgcgtctgctgctgcggttccatcccaacgagtgcctccgacaccttgtcgttgatcacccgcaccgcgtaggcgacccccctggcgaggaacttccgcctctcggaggccccggccgcgtcggcggcggcgccctcgagcgcgcccacgctagccgtagatgctcggtgcacggccttgttggtgtgcaactcgacctcaacggccggtgcgctacgcccgtcaaggatctggcgcgcccgcaccctcgtgatcacggtgggcgcctcccgcctcatgtggccgacgatgaaaagcgccgggttaggggccttggcgcgcaccgccgtattcagggcctcctcgctcttgcgcgagagcaggtgcttccccaggtactcctgcactgacaaggctgccacagcggtggaatttgtcctcacgacttcgccacgtcgtcctcacctccctggcttcccacgactccgccgtatcgaggtgctcggtgggtcgtcttaatccgaagtccgaactaggaagacgagacagagaggtctgaggaatgggcctcgtttgatgttgagctgaattatttttccagcataagcccaggtcttggtccatgaacaaaattactagaaacccagcccagtactacgatctaaaagagggactgccactggatagctctctctagcattctccacgctccaatacagcggcgtcgtgtctatccgggtctatccgcgaacacgtgagaactctccagaaactgctttctcctccacttcatctctctcgctttccctctataaaaagaccccttctaggaattgagggagacagcaagcaccaagcagcgatccgaagctcaatcaattcactcaaacctcttccccaaatcttcgattagatcttcgttgacaagaagactagaaccgaacctgacatgtccaacctgctcacggttcaccagaaccttccggctcttccagtggacgcgacgtccgatgaagtcaggaagaacctcatggacatgttccgcgacaggcaagcgttcagcgagcacacctggaagatgctgctctccgtctgccgctcctgggctgcatggtgcaagctgaacaacaggaagtggttccccgctgagcccgaggacgtgagggattaccttctgtacctgcaagcgcgaggtttgtttctgcttctacctttgatatatatataataattatcattaattagtagtaatataatatttcaaatatttttttcaaaataaaagaatgtagtatatagcaattgcttttctgtagtttataagtgtgtatattttaatttataacttttctaatatatgaccaaaacatggtgatgcctaggtctggcagtgaagaccatccagcaacaccttggacaactgaacatgcttcacaggcgctccggcctcccgcgccccagcgactcgaacgccgtgagcctcgtcatgcgccgcatcaggaaggaaaacgtcgatgccggcgaaagggcaaagcaggccctcgcgttcgagaggaccgatttcgaccaggtccgcagcctgatggagaacagcgacaggtgccaggacattaggaacctggcgttcctcggaattgcatacaacacgctcctcaggatcgcggaaattgcccgcattcgcgtgaaggacattagccgcaccgacggcggcaggatgcttatccacattggcaggaccaagacgctcgtttccaccgcaggcgtcgaaaaggccctcagcctcggagtgaccaagctcgtcgaacgctggatctccgtgtccggcgtcgcggacgacccaaacaactacctcttctgccgcgtccgcaagaacggggtggctgcccctagcgccaccagccaactcagcacgagggccttggaaggtattttcgaggccacccaccgcctgatctacggcgcgaaggatgacagcggtcaacgctacctcgcatggtccgggcactccgcccgcgttggagctgctagggacatggcccgcgccggtgtttccatccccgaaatcatgcaggcgggtggatggacgaacgtgaacattgtcatgaactacattcgcaaccttgacagcgagacgggcgcaatggttcgcctcctggaagatggtgactgaggtacccaacctagacttgtccatcttctggattggccaacttaattaatgtatgaaataaaaggatgcacacatagtgacatgctaatcactataatgtgggcatcaaagttgtgtgttatgtgtaattactagttatctgaataaaagagaaagagatcatccatatttcttatcctaaatgaatgtcacgtgtctttataattctttgatgaaccagatgcatttcattaaccaaatccatatacatataaatattaatcatatataattaatatcaattgggttagcaaaacaaatctagtctaggtgtgttttgcgatccgatatcgaattggccacggtaccagctgctgctgttctagggttcacaagtctgcctatttgtcttccccaatggagctatggttgtctggtctggtccttggtcgtgtcccgtttcattgtgtactatttacctgtaatgtgtatccttaagtctggtttgatggtgtctgaaacgttttgctgtggtagagcagcatggaagaactataatgaataagtgatccctaatcattgtgtccaaattttgcttctgctatacccttttgtgctgtttcttatgttttgcttaaaaatttgatctgacaaacaaatttgtctaaattatgctcttgttctgactgtgtactgtacacatttgtattgctaccggtttggcacatagttttctctttgattgcagatcaaacccttctgattgcagattgcttggctatggctgatgtgctcactgttcttctttagcttgtatattgctgatggtggcttggctacggctgaaaaagttgctgctgcgccgacttggcaactgttgctccagtaatgctttgtcctctcttcctagccgccgacttggcacttggcagctgttgctcctgtaatgcgttgttatctcttatctcttgagatgtactatgattttgaggctgtttgacttgtgccagattgccagtgctgatgctatattatctcaggtttttatgctagtatatgttttactgtgtgctgcctgtgtcgagttacgtaatctattgaaccgctatgcgtgttgatgccctgttgttgcttgccagattgatgcccctgttgcttgcagcttgcaagctgtagtgaaatcctaaaattccaaaccaaatctattctgaacttttgaagatctgtgatgtccggaagaaaagattcaaacagataaacgggactctccagaatctataaaataaatgatcgacaaacgctttgctttggtaggcttcaagcttggtcacccggtccgggcctagaaggccagcttcggccgccccgggcaactttattatacaaagttgatagataaatcagatatctggttcctaaggacccggcggaccgattaaactgattcggtccgacgcgttacctaataacttcgtatagcatacattatacgaagttattagctaactaactagtaagcttaagccatgggtcgacggatccgttaactagcgtggcatttggcaccgccgcacactatgcgagctaggagtgctagtttacagatgaaactatgaaaccaagaaaacacaattgtccgtagctagcgcgtggcgtcgtgtcaagcttcacacagtatcttcgttcttcactataaatcgcgcctgttgttcgtgagacccaccaccgtggataacagtcccctaataataagcgatcaacagcactgctgatggctgaacaccgaggcgccgccgcgcgtaaccatccgccggagcagcccgtcgtgccggcgaacgacgccttccccgaccgcgcccagcagctctgcctcgacgccgggcgcgcgctcgcgatgtgcggcgtgctcgtcgccgtccctcccgcattttacgcgtcgacgtcgcggacgacaccgcacttgccttcgtcggcttcgtcctctggatcatcggtgcgtggctgtgcctcctggcgctcacgcccttggctccacgggcggtgagggcgggcggggccgccgccagcaccttgctgatcaggtgcctgtccctttcatgaactactagcgcccgcgcccgcggccgccgggcacaagagaacacatcgatgttcgctgcgtacgtcagcaataaggcactctttgtcagtagtcgagtgcatatgttgggtgtttgccctgggagatttcaagtgttgtggccattatcccgcaggataaaaaatcggcggcttttggattgatacggaaaataacgatgtttcatgctcgtgttgtgtgtgtgacatcttgtcagccaagtttttaaccgttgctactccccctctgtgggctcagtgtgtggaccggaatacgtcgtacataggccgtagcctaagcccaatatgccgtttttcaggttggcctgtgtgacgacaagcgggtctcaaaagcccatcacgcaactggcctgcaattattggaggagagcgcgtcgagttggttccagaggctgcgtggtggggccggactctgcgacgacctctcgttcgcgtccgatttggttgccgtgagccgtgacgtaacgcctccttccgttcctccctatataagttccacccccgggtccggtttccccaagccccagtgacccccgatcccgatcgcgaaatctccgcacccgccggcaagggaccgaagcaagcctctctcccgaccgtcgcatcaaggtacgcgtccgctcgatctgtcctcttccttctcgatttgacttgctgtggtgcccgatcacgggatcagaatcgcaccagtgtagatttcgcatgttctaagatgtgttagtttccaggctaatccagttctcttgacgcccgatccgatcgagctccgtgtttatttcagcctaatcgtagtattcccctaaaatttcctcattagggggttcgcaagattgttggtcgacaggttcacttatgctcgatcgcttacttttagtcgattcatgctgcgtactattgttgccccccgtggttttatcttttctcgtgtgaaatccagtagatatagtagatatcgtagcattaggttttaattcaatcgattgattattgtatcatcaaaattgagaagttcgaatcatgcctatcatgctgcctcaaccgaaatcctgtatattgaagtttcaattcaattgattgatcattcattagattcaaccaaaatctagaaggttagatgacgcatgtcatgctgcctgcgtagtttacctttgatctgtttatgattaccttatcagtaggatatttgtgattttgggaagtagcactaactgattcatgctgacatgatgttccctttcagattatactgttgagtcctatctaattgatgctttgtatgctatatgaatacgtcatggtaaattagcagttaattagcatattagcaattgggcgtacctcatcaggattgctcttgtagatgtgtgtggtgatgtttcttgttcaattcatgttctgctttaaaagtatgtgttctctgtttgttaattaagattcatggttataatgatttggacctaattaatcagggttgcccttttagatgcgtggttacttgttgagttcatttttttcctgctatagttgtatgcgtttgttcattcatggttagatttgatttgtttcttctctattccatgccttccatatacttcaattgtagcttaacatgagatttctgtatatgcaggtcgaccgccggggatccacacgacaccatggcccagtccaagcacggcctgaccaaggagatgaccatgaagtaccgcatggagggctgcgtggacggccacaagttcgtgatcaccggcgagggcatcggctaccccttcaagggcaagcaggccatcaacctgtgcgtggtggagggcggccccttgcccttcgccgaggacatcttgtccgccgccttcatgtacggcaaccgcgtgttcaccgagtacccccaggacatcgtcgactacttcaagaactcctgccccgccggctacacctgggaccgctccttcctgttcgaggacggcgccgtgtgcatctgcaacgccgacatcaccgtgagcgtggaggagaactgcatgtaccacgagtccaagttctacggcgtgaacttccccgccgacggccccgtgatgaagaagatgaccgacaactgggagccctcctgcgagaagatcatccccgtgcccaagcagggcatcttgaagggcgacgtgagcatgtacctgctgctgaaggacggtggccgcttgcgctgccagttcgacaccgtgtacaaggccaagtccgtgccccgcaagatgcccgactggcacttcatccagcacaagctgacccgcgaggaccgcagcgacgccaagaaccagaagtggcacctgaccgagcacgccatcgcctccggctccgccttgccctccggactcagatctcgatagagtcaacctagacttgtccatcttctggattggccaacttaattaatgtatgaaataaaaggatgcacacatagtgacatgctaatcactataatgtgggcatcaaagttgtgtgttatgtgtaattactagttatctgaataaaagagaaagagatcatccatatttcttatcctaaatgaatgtcacgtgtctttataattctttgatgaaccagatgcatttcattaaccaaatccatatacatataaatattaatcatatataattaatatcaattgggttagcaaaacaaatctagtctaggtgtgttttgcgaattgcggcgcccttactttaacgcctctaaccaacacccctttatctttataaggaacaataaacagaatttgccccactgttctaaatcacctaataatatccccagctaaaaacaataaaggtttcctagaattaagacaagcatgactgttcctccaggagggtttggaacattgttgcagtcttgcagatacgggcgaagggtgagaaacagagcggagggctggaggtgacctcggtagtcgacgccggagttgagcttgacaacgacggggcggcccctgatggacttgaggaagtccgatggcgtcttcaccgtcccgccggcgcccgaggcgggcctgtcgctgccgccgccgccgctgctcatcttgcgcgctgtgcccccggcggtgtccctgtgttgcggatcgcgggtgggccaggtggatgcgagggcgacccgtttggactccggccggagccgccggatccctggtcggtgtcagtgccgtttactctgggccccacgtgtcagtaccgtctgtagatgacaacaacccgtcgtccacagtcatgtccaaaatatcctttcttcttttttttcgattcggatatctatcttccttttttttttccaaaaatcttcttgacgcaccagcgcgcacgtttgtggtaaacgccgacacgtcggtcccacgtcgatagaccccacccaccagtgagtagcgtgtacgtattcgggggtgacggacgtgtcgccgtcgtcttgctagtcccattcccatctgagccacacatctctgaacaaaaaaaaggagggaggcctccacgcacatccccctccgtgccacccgccccaaaccctcgcgccgcctccgagacagccgccgcaaccatggccaccgccgccgccgcgtctaccgcgctcactggcgccactaccgctgcgcccaaggcgaggcgccgggcgcacctcctggccacccgccgcgccctcgccgcgcccatcaggtgctcagcggcgtcacccgccatgccgatggctcccccggccaccccgctccggccgtggggccccaccgagccccgcaagggtgctgacatcctcgtcgagtccctcgagcgctgcggcgtccgcgacgtcttcgcctaccccggcggcgcgtccatggagatccaccaggcactcacccgctcccccgtcatcgccaaccacctcttccgccacgagcaaggggaggcctttgccgcctccggctacgcgcgctcctcgggccgcgtcggcgtctgcatcgccacctccggccccggcgccaccaacctagtctccgcgctcgccgacgcgctgctcgattccgtccccatggtcgccatcacgggacaggtggcgcgacgcatgattggcaccgacgccttccaggagacgcccatcgtcgaggtcacccgctccatcaccaagcacaactacctggtcctcgacgtcgacgacatcccccgcgtcgtgcaggaggctttcttcctcgcctcctctggtcgaccagggccggtgcttgtcgacatccccaaggacatccagcagcagatggcggtgcctgtctgggacaagcccatgagtctgcctgggtacattgcgcgccttcccaagccccctgcgactgagttgcttgagcaggtgctgcgtcttgttggtgaatcgcggcgccctgttctttatgtgggcggtggctgcgcagcatctggtgaggagttgcgacgctttgtggagctgactggaatcccggtcacaactactcttatgggcctcggcaacttccccagcgacgacccactgtctctgcgcatgctaggtatgcatgggacggtgtatgcaaattatgcagtggataaggccgatctgttgcttgcacttggtgtgcggtttgatgatcgcgtgacagggaagattgaggcttttgcaagcagggctaagattgtgcacgttgatattgatccggctgagattggcaagaacaagcagccacatgtgtccatctgtgcagatgttaagcttgctttgcagggcatgaatgctcttcttgaaggaagcacatcaaagaagagctttgactttggctcatggaacgatgagttggatcagcagaagagggaattcccccttgggtataaaacatctaatgaggagatccagccacaatatgctattcaggttcttgatgagctgacgaaaggcgaggccatcatcggcacaggtgttgggcagcaccagatgtgggcggcacagtactacacttacaagcggccaaggcagtggttgtcttcagctggtcttggggctatgggatttggtttgccggctgctgctggtgcttctgtggcaaacccaggtgtcactgttgttgacatcgatggagatggtagctttctcatgaacgttcaggagctagctatgatccgaattgagaacctcccagtgaaggtctttgtgctaaacaaccagcacctggggatggtggtgcagttggaggacaggttctataaggccaacagagcgcacacatacttgggaaacccagagaatgaaagtgagatatatccagatttcgtgacgatcgccaaagggttcaacattccagcggtccgtgtgacaaagaagaacgaagtccgcgcagcgataaagaagatgctcgagactccagggccgtacctcttggatataatcgtcccacaccaggagcatgtgttgcctatgatccctagtggtggggctttcaaggatatgatcctggatggtgatggcaggactgtgtactgactagctagtcagttaacagatctgccagatcctcggtgtacaaataacccgtcttatcctatgagacgggccggcgtcagtgtgttctggaggaatttttatgtcagagcctttttctttgtgtgcttgatgtagatgccaagggaagcttattggctgttgaagcttgatgcaaaataaattatggaactctgttttttgtttatctaataataactagcaaatatgcttccattgcattgaaactaacagccttttgtgtttccaagttttattttgtgacaatgtcatctatttcaattagttgtggaatcggaaacttgcaggactaacttggaaactccaatccctcagcatcctggactttttcctggtgtaatccatgtagatattattttaatcatcattttagttctggaggtttttccatctccggttttgctcccctttcttcaaaaaaaaaaaaaaaatgccgtaggcgccgcaacgcccacctgttgttcaaactcatgggcacgagtggctcgaagattttatacaacaattgctgtagtttcaccgttgctggtgaagaagcatttttttaaaaaaatatagtggtattcattttaattagtttagttgtgcagcgagcaaaatttggacatgctctgctcggaatctgatcgacctagacacagattagcagcagtagctttgtcatctgttccaagagttgcgatctgatagaagaaaaaaaaaccttcccttcaatgtaaaaccgaaactaacaagaaagaagcacagtgccgtttaggcaagtatggagtacgtattaagcatgtagaaggccatgcatgaaccactaacaagaaagaagcgcagtgccattcaggcaagcataagcatgtagattggcatgcatgaacaactaacagtagatcgtctctggtctgattagaagttttttgggaagccaagaaatcatgtacaactggttccatctcaaattccgtggcaaaaagaggcctaagcaacatacctcgagtagatcacattcaagcttggtcacccggtccgtcaatattctgattccgatgacttcgtaggttcctagctcaagccgctcgtgtccaagcgtcacttacgattagctaatgattacggcatctaggaccgactagtggcgcgccgactagctagctaaggtaccgagctcgaattcattccgattaatcgtggcctcttgctcttcaggatgaagagctatgtttaaacgtgcaagcgctactagacaattcagtacattaaaaacgtccgcaatgtgttattaagttgtctaagcgtcaatttgtttacaccacaatatatcctgcca

SEQ ID NO: 266 - DNA, 23199 bp, synthetic construct
  misc_feature 1..23199: note = PHP99679
  source 1..23199: mol_type = other DNA
gtttacccgccaatatatcctgtcaaacactgatagtttaaactgaaggcgggaaacgacaatctgatcatgagcggagaattaagggagtcacgttatgacccccgccgatgacgcgggacaagccgttttacgtttggaactgacagaaccgcaacgttgaaggagccactcagcaagctggtacgattgtaatacgactcactatagggcgaattgagcgctgtttaaacgctcttcaactggaagagcggttacgctgtttaaacgctcttcaactggaagagcggttactaccggttcactagctagctgctaatcgagctagttaccctatgaggtgacatgaagcgctcacggttactatgacggttagcttcacgactgttggtggcagtagcgtacgacttagctatagttccggacttacccttaagcgatttaaatctgcggttaccgaattcgagctcggtacctagtacccttgtacttttggtttcacctgcatagagaaaacccacaagaatatgacagtctgatttgtcagtctcattctcaagcaacatttctctatccgttactttcatggtgaataacacaatccatcatcaatactttgtgttactcagaaactgaaagttattccgagtcttgcatatctttggacctactcgtttttctaccattattgctgattgttaagctctcgctacttgaatcggcattgttggagtgggaaggttcaaaaaattggagttatgactagttgtctctttctatgtacgatggagaaaatgaataaacaactgagaaaatggctcttgtttagttgatgatgctcttaagctttccactggttgccatatatgatttgggcatttcactttgatcttaatgggccttgtaaagcccaagactcatgattatctttagttgatgctcttaattaggtgtgggcaaataattcaaactgtatgtacccgaccaaaaccaaagcaaaaataatcgaaccaaaccgaaaatttaaaaataaccgaatgaaaactaaatcctataactgaaagaactgaaaccgaatcaaaatatttaatgtaaccaaaaatatccgaaatataattatattgtcaaaaatattaataatttctagattaaataattaaaaatacttaaaaatttatataaaatagtaaaaatactcgaaaataaccacaaatattcaaaaacaaccgaaatatcccaaaatattcaaagcaaaataaccgaatggataccaaattttaaaaccgaaaaaactggaacaaaaccaaaatcgaaccaaaatttcaaaaatcgaataaatactaaactttagaacaaaaaaaaacgataaccgaatgtatacgaaccaaagccgaattagataaccgaacgtccaggactactcttaatctttccgccacttatgatttgggctattactttgtttataatgagccttttcaagctcaagttcatgattgtccgtgagatgagaaactgacttgttggattcgaaaccctagctagtattggttaatacttaatacataaatgacctgcattgacatcatcatccaagaaaataaaaattgtatgcttgagatatttagttttcctagctaggttttctttattttagtaccgaatctttaggtgtgccacgttaatttagacccattttttcatacttaccaactgagtctagtttaatcatgactataatcgtataaaatgattcagtcgacgtcattgcgaacgtatataaaatcatccaaattgacgtcattccaaagaggtaagcatgcttatctaagagtccgagcatactaaacaagacgacattttatttgcactccaaatcaaattttgtattgcctaaagaaaaacaatcaaactcaagtttcttaaaattaatttcattcaaactaatcactttcaatatctcacatattattcatgccatttctatttgtctaaacatgatttaaaaaaaaaagtaaaatacaaagattactatgcaaaaactctataaaaaaaaattcaaatttcttatttatttgtgacatcaaattttcaaaataatttttttaattatcggttgatccggtcagtcgataaaaacataaactttcagcgaccgttaaaactttcctactaccgatttagagaaaatcttagcttgaaacgtaattgtaacctgccttcatgcaagtcgcaagatatgtcatcctaagttgtatatgttttctcaaaagatgtatttacttgagaaaatacgtttcaacgttgatggacaaccaattaagaatcaagcacctttcgtaatcaatttaggcttatcgtctaaggtatactgatttacgacagttgactagacttataaggaacaaaataatagaatagtttctaaacacttcacctaatcatagagactaagatggtaattcgtaaacgacaaagcctagtgacactgtccattgtaaaattccacatcatattagtattaaacatatacatgtagtttcctgaacacatgtagtatcaaacacacttcgtggcttcttcctcgaaacctgcggccgcgctatagttccggacttacccttaagataacttcgtatagcatacattatacgaagttatgggcccacgcgtgaagagcggttaccagagctggtcacctttgtccaccaagatggaactgtcttcggccagaatggccatctggattcagcaggcctagaaggccatttatcgctatcaactttgtatagaaaagttgggccgaattcgagctcggtacggccagaatggcccggaccgaagcttgcggccgcacactgatagtttaaactgaaggcgggaaacgacaatctgatcatgagcggagaattaagggagtcacgttatgacccccgccgatgacgcgggacaagccgttttacgtttggaactgacagaaccgcaacgttgaaggagccactcagccgcgggtttctggagtttaatgagctaagcacatacgtcagaaaccattattgcgcgttcaaaagtcgcctaaggtcactatcagctagcaaatatttcttgtcaaaaatgctccactgacgttccataaattcccctcggtatccaattagagtctcatattcactctcccgggggatctcgactctagaggatcgctcaggaaggccgctgagatagaggcatggcggccaatgcgggcggcggtggagcgggaggaggcagcggcagcggcagcgtggctgcgccggcggtgtgccgccccagcggctcgcggtggacgccgacgccggagcagatcaggatgctgaaggagctctactacggctgcggcatccggtcgcccagctcggagcagatccagcgcatcaccgccatgctgcggcagcacggcaagatcgagggcaagaacgtcttctactggttccagaaccacaaggcccgcgagcgccagaagcgccgcctcaccagcctcgacgtcaacgtgcccgccgccggcgcggccgacgccaccaccagccaactcggcgtcctctcgctgtcgtcgccgccgccttcaggcgcggcgcctccctcgcccaccctcggcttctacgccgccggcaatggcggcggatcggctgtgctgctggacacgagttccgactggggcagcagcggcgctgccatggccaccgagacatgcttcctgcaggactacatgggcgtgacggacacgggcagctcgtcgcagtggccacgcttctcgtcgtcggacacgataatggcggcggccgcggcgcgggcggcgacgacgcgggcgcccgagacgctccctctcttcccgacctgcggcgacgacggcggcagcggtagcagcagctacttgccgttctggggtgccgcgtccacaactgccggcgccacttcttccgttgcgatccagcagcaacaccagctgcaggagcagtacagcttttacagcaacagcaacagcacccagctggccggcaccggcaaccaagacgtatcggcaacagcagcagcagccgccgccctggagctgagcctcagctcatggtgctccccttaccctgctgcagggagtatgtgagagcaacgcgagctgccactgctcttcactgatgtctctggaatggaaggaggaggaagtgagcatagcgttggtgcgttgctgtcaagggcgaattcacatggttaacctagacttgtccatcttctggattggccaacttaattaatgtatgaaataaaaggatgcacacatagtgacatgctaatcactataatgtgggcatcaaagttgtgtgttatgtgtaattactagttatctgaataaaagagaaagagatcatccatatttcttatcctaaatgaatgtcacgtgtctttataattctttgatgaaccagatgcatttcattaaccaaatccatatacatataaatattaatcatatataattaatatcaattgggttagcaaaacaaatctagtctaggtgtgttttgcgaatgcggccgccaccgcggtggagctcgaattccggtccgggcctagaaggccagcttcaagtttgtacaaaaaagcaggctccggccagaatggcccggaccgggttaccgaattcgagctcggtaccgtccatgggtatccgaaacctgaatacctgattagaagacgggtatgggatggttcctttaccaattaatgggaaagaacgtctactcgtttggtagacgggtataggtggatactaccccatacccgtctacccgtaaaaaatatgctcgcaacataccaatattatcatctaataaagcccatcttaactagaaggaaccccttgttcgaatattatttgtttaattatcaagttatgtagtcatgtggtttgttatatttgaagttcaacttatttttatatgtttgtttgtcattctgagtgattggcatattacaatttaagatttttctagcggtacgggctacccgatggataaaattacctacgcggggtatgtgtacgagtaagattgtatattgtgagtgtatatgggcaactcgacgaacatatttttttggtggatacaagtatggaatgctattacctgtcaggtttatattcattgccatctctatccccatatggtgattgtcctcctacattcgtgacaattccccaaggagcaacaggcgacattgatgtcacttcgaacaaatctgcttactttaatgcttcataattttaacaacaaagaggatggaggaagacaacagataaaatatcgataaatacacatatttaaaaaaaatccacactattttaggctcacaatagtttttaaagtccatatttcttagatccatgaatggctactacactcaattaactctattgatggcaacaataaaaagagatcaaaattatgggtaaatagccaacacatataactccaccgcataagcgcgtcaccacaatacccaaaacaactaaagaaccgatggtcgatgagcgatcataagatcaacctctttaacaacatctacaaccgtttgtgcacagcctgattgagtgacccaatgaggctatgctgctttaagcggttaaggaaaatttccacaacaagcatagaaaaaacaagttggagcacacgtgacacgttatgccattagctcaagtggtgcgtaaaacacgatgataatgactcgagtgatgagagaaaaagatatgttcttaacttggacgacaatcaaagctcaatgacatatgaaagtatggacacactatgctctattgtcaccatagggcaagagttcagtagaaggcaaattgttcgacaacaagctatgttggtcttttgattctgacgagtcaatgatagcttttcaatgatactattaactttctaaaattaggaagcaacaaaaaatctacaaaaaacatactttttaacttttggtaaaagctaaacttttttgagttttttcccgaaagcacgcctagtcagccaccagctggcacgcgagtctcccaacaataggagggaccacctgtcatgctgtgggaccacgaagaaaaccctccagagacgacgatagacctccgtccatagacgcggtctaccgtggtccggacgctcccggccgcgaattcaggtcgtggcgggccctgccgacccaactactggtccagaggcctccacgcgagccgtgggccgtggtctaggagccgggtccgcctatctacttgacggtcacggaaacccggacccggtaggaaggagctataaagacaagccaaacgagggcatcccttcttcagccgcacgcttcttgttgccaaagaattccctcccctagccgccgccgccgccgctcgtctccctgagaggtgccgggaccgaggaactggccgagtactaggtagagaatcggtttttcttgtctcagcccggggtctgctgcgtctggtggtggtgaaggggagaaattcgtgagatctgttccggatcaggcgtgcgagctcgggaatcaggggtttcacacatagcttcgtcgatttgtaagttttttctagccgattcctctctttttgtacgttttttgttattagattcgagatttgttggatgtgttggtttatgttgctgcctttctagatttctcggtgtgaatgtatgagggttcgatccttaggcatgaaaacatagctacatggagttagctcgttttcttaagtcacgtggtggtcggcgttatacctgttgcttgatgcgttatccgtgctatcgctgttcagatttagataggtggatcggtcatttgttcgttgtacgtattttgttacttcaaaattgatgctaaccctgttaattgaaaattgatggcagtggatacgctccacctttgtttagatttggaaacatggttaggaaatatgtgttcatattaggaaacgtggataggaaatatggctcattaccctggtactcggaaaagtaaggaaaaactattaacctttttgtttaggttttgattcgtggacaagatctataaattcactgaaaagacgcatacgatttcttgtacaggtgatatcatgccatgtggaaagtaaatgaaatcatacaaggctgatttttgcttttgttcccatcagatctgtgatttagttttgttttcccaaacaggttatgtttggtcatgtactcatgtgaatgatatagatctgttgctctaattagttagaaacatttattttgggcatatatctttaatggcataactgtggtacgttgtgatggtttattttagctgtcgtgcctggatcatcaacatcttgttttatcttttatgagaagaatttttgttcgatttgatggatgtgttcaatattttggtcttccatgcaggaatttgatgtactaatggagtctaagggtggcaaaaagtctagcagtagtcgttctatgatgtatgaagctccccttggctacagcattgaggacgttcgacctgccggaggcgtgaagaagttccagtctgctgcttactccaacgtaaaaaatcaatcatcacaatgatgctcttcattctacctcttgtattttattagatatatgttgatagtaacatctattttttcttgttgcagtgcgcgaagaagccatcctgatatcccttttggcttcctcattctagtagtttaggatttcttttctgacactttgattctgaccaatctctctggcctgctgcttcctgataatcgaccagttccccagtcttgctccttgcactcctccctccatctccagcattgtgttctgattcacctgctccaggatccatggccactgtgaacaactggctcgctttctccctctccccgcaggagctgccgccctcccagacgacggactccacactcatctcggccgccaccgccgaccatgtctccggcgatgtctgcttcaacatcccccaagattggagcatgaggggatcagagctttcggcgctcgtcgcggagccgaagctggaggacttcctcggcggcatctccttctccgagcagcatcacaaggccaactgcaacatgatacccagcactagcagcacagtttgctacgcgagctcaggtgctagcaccggctaccatcaccagctgtaccaccagcccaccagctcagcgctccacttcgcggactccgtaatggtggcttcctcggccggtgtccacgacggcggtgccatgctcagcgcggccgccgctaacggtgtcgctggcgctgccagtgccaacggcggcggcatcgggctgtccatgattaagaactggctgcggagccaaccggcgcccatgcagccgagggtggcggcggctgagggcgcgcaggggctctctttgtccatgaacatggcggggacgacccaaggcgctgctggcatgccacttctcgctggagagcgcgcacgggcgcccgagagtgtatcgacgtcagcacagggtggagccgtcgtcgtcacggcgccgaaggaggatagcggtggcagcggtgttgccggcgctctagtagccgtgagcacggacacgggtggcagcggcggcgcgtcggctgacaacacggcaaggaagacggtggacacgttcgggcagcgcacgtcgatttaccgtggcgtgacaaggcatagatggactgggagatatgaggcacatctttgggataacagttgcagaagggaagggcaaactcgtaagggtcgtcaagtctatttaggtggctatgataaagaggagaaagctgctagggcttatgatcttgctgctctgaagtactggggtgccacaacaacaacaaattttccagtgagtaactacgaaaaggagctcgaggacatgaagcacatgacaaggcaggagtttgtagcgtctctgagaaggaagagcagtggtttctccagaggtgcatccatttacaggggagtgactaggcatcaccaacatggaagatggcaagcacggattggacgagttgcagggaacaaggatctttacttgggcaccttcagcacccaggaggaggcagcggaggcgtacgacatcgcggcgatcaagttccgcggcctcaacgccgtcaccaacttcgacatgagccgctacgacgtgaagagcatcctggacagcagcgccctccccatcggcagcgccgccaagcgcctcaaggaggccgaggccgcagcgtccgcgcagcaccaccacgccggcgtggtgagctacgacgtcggccgcatcgcctcgcagctcggcgacggcggagccctggcggcggcgtacggcgcgcactaccacggcgccgcctggccgaccatcgcgttccagccgggcgccgccagcacaggcctgtaccacccgtacgcgcagcagccaatgcgcggcggcgggtggtgcaagcaggagcaggaccacgcggtgatcgcggccgcgcacagcctgcaggacctccaccacctgaacctgggcgcggccggcgcgcacgactttttctcggcagggcagcaggccgccgccgctgcgatgcacggcctgggtagcatcgacagtgcgtcgctcgagcacagcaccggctccaactccgtcgtctacaacggcggggtcggcgacagcaacggcgccagcgccgtcggcggcagtggcggtggctacatgatgccgatgagcgctgccggagcaaccactacatcggcaatggtgagccacgagcaggtgcatgcacgggcctacgacgaagccaagcaggctgctcagatggggtacgagagctacctggtgaacgcggagaacaatggtggcggaaggatgtctgcatgggggactgtcgtgtctgcagccgcggcggcagcagcaagcagcaacgacaacatggccgccgacgtcgggcatggcggcgcgcagctcttcagtgtctggaacgacacttaagcgtacgtgccggcctggctctccgaaagggcgtattccagcacactggcggccgttactagacccaacctagacttgtccatcttctggattggccaacttaattaatgtatgaaataaaaggatgcacacatagtgacatgctaatcactataatgtgggcatcaaagttgtgtgttatgtgtaattactagttatctgaataaaagagaaagagatcatccatatttcttatcctaaatgaatgtcacgtgtctttataattctttgatgaaccagatgcatttcattaaccaaatccatatacatataaatattaatcatatataattaatatcaattgggttagcaaaacaaatctagtctaggtgtgttttgcgaatgcggcctccgggcacccagctttcttgtacaaagtggccgttaacggatcggccagaatggcccggaccgggttaccccgcggttcaaagccaatgactgttgttaggtccagtttctaaggacgaatcatccaatcactggttctttctgaacaaaacaaagagctatagagttacgttactgtagccgagacagagcctgcaatctggttatgccacatactaggttctttcttaaagttgactcactctatcctaagttctacttacaaggagctacaacaaattggtcataaccggagagcgttcaaggaggtaatatcccatcttactctgtagcaaggctacaaaaggagagctaaagaactaggctacaaaaagagagctaaagaactaactatctagcaagactacagagctatagtgtagagatttcataaccggtgagcgttcaaggatactttgaagagaagaggtaatatctcaactagcaagactacaaaaaaatggagatataaaactaactgtctaacaagactacagagctatagtagagatagatacgttcgacacttaagcatgagaattcgagctcggtaccctggttcacaaactcaatacaacacacagtggagtagggtattacgctccggcggcccgaaccactctaaatccttgtgtcctcgtgtgctcttccaccattaatgactgtaattgcagggacacgaagagttgtagcgcttttgccaacaagatccgctatatgctagtagagtggaacctgcacagcaacaagcatccaataatctgagaataagaattatgtgtggtgatggttctcatctctgcaactcgccattttcgcgagagaaccaaatccaagttggtgaagatcatgatttgggctcatgggctggcatagtagctattacctttgcaattgtggttcgaatctatccgatattctccttttcagggagagctaatgcttatgcttattgggtattttggtttgacactgcttcacgcccaaaaaaaggcaactatgtctgagttggatatggcccaaaaaaaggcagctatgtctgagttggatatggaagtcttctttcgtttagggtgaagtaagaccaagctcatgagcttattatcttaggtcggaacaaattagttgataggcatggcacatttatcaaattataatgattttaacagaaaagcaacacctctttttcagcagcaccagctttgcaagctgcaattgacactccaagcatagtatttgctccaaactcagcctgcatttcgcacaatatcatatctatttccatttggataaaatatattttccagaaatatgggaacagaatcaagatacagaaaaaagttgtggtagtagtggtaagtggaaacacaagtacagtgaaaagatagcattatttctgaacagtcaaattaaccgaaataagtagtatcacatactgcccctaaattgactacacccaatgtaaagaattgcttgagcatattgagccatcagttgtttgtttgtgtaacggatttgacaatgcagagttcaggagcaaaaaaccgcaaaggagagaaagagggaaaggatctcctagtatcccaccttgtggcgcgccctgtcaagtgcatgatggcctggtcgatctgcgtctgctgctgcggttccatcccaacgagtgcctccgacaccttgtcgttgatcacccgcaccgcgtaggcgacccccctggcgaggaacttccgcctctcggaggccccggccgcgtcggcggcggcgccctcgagcgcgcccacgctagccgtagatgctcggtgcacggccttgttggtgtgcaactcgacctcaacggccggtgcgctacgcccgtcaaggatctggcgcgcccgcaccctcgtgatcacggtgggcgcctcccgcctcatgtggccgacgatgaaaagcgccgggttaggggccttggcgcgcaccgccgtattcagggcctcctcgctcttgcgcgagagcaggtgcttccccaggtactcctgcactgacaaggctgccacagcggtggaatttgtcctcacgacttcgccacgtcgtcctcacctccctggcttcccacgactccgccgtatcgaggtgctcggtgggtcgtcttaatccgaagtccgaactaggaagacgagacagagaggtctgaggaatgggcctcgtttgatgttgagctgaattatttttccagcataagcccaggtcttggtccatgaacaaaattactagaaacccagcccagtactacgatctaaaagagggactgccactggatagctctctctagcattctccacgctccaatacagcggcgtcgtgtctatccgggtctatccgcgaacacgtgagaactctccagaaactgctttctcctccacttcatctctctcgctttccctctataaaaagaccccttctaggaattgagggagacagcaagcaccaagcagcgatccgaagctcaatcaattcactcaaacctcttccccaaatcttcgattagatcttcgttgacaagaagactagaaccgaacctgacatgtccaacctgctcacggttcaccagaaccttccggctcttccagtggacgcgacgtccgatgaagtcaggaagaacctcatggacatgttccgcgacaggcaagcgttcagcgagcacacctggaagatgctgctctccgtctgccgctcctgggctgcatggtgcaagctgaacaacaggaagtggttccccgctgagcccgaggacgtgagggattaccttctgtacctgcaagcgcgaggtttgtttctgcttctacctttgatatatatataataattatcattaattagtagtaatataatatttcaaatatttttttcaaaataaaagaatgtagtatatagcaattgcttttctgtagtttataagtgtgtatattttaatttataacttttctaatatatgaccaaaacatggtgatgcctaggtctggcagtgaagaccatccagcaacaccttggacaactgaacatgcttcacaggcgctccggcctcccgcgccccagcgactcgaacgccgtgagcctcgtcatgcgccgcatcaggaaggaaaacgtcgatgccggcgaaagggcaaagcaggccctcgcgttcgagaggaccgatttcgaccaggtccgcagcctgatggagaacagcgacaggtgccaggacattaggaacctggcgttcctcggaattgcatacaacacgctcctcaggatcgcggaaattgcccgcattcgcgtgaaggacattagccgcaccgacggcggcaggatgcttatccacattggcaggaccaagacgctcgtttccaccgcaggcgtcgaaaaggccctcagcctcggagtgaccaagctcgtcgaacgctggatctccgtgtccggcgtcgcggacgacccaaacaactacctcttctgccgcgtccgcaagaacggggtggctgcccctagcgccaccagccaactcagcacgagggccttggaaggtattttcgaggccacccaccgcctgatctacggcgcgaaggatgacagcggtcaacgctacctcgcatggtccgggcactccgcccgcgttggagctgctagggacatggcccgcgccggtgtttccatccccgaaatcatgcaggcgggtggatggacgaacgtgaacattgtcatgaactacattcgcaaccttgacagcgagacgggcgcaatggttcgcctcctggaagatggtgactgaggtacccaacctagacttgtccatcttctggattggccaacttaattaatgtatgaaataaaaggatgcacacatagtgacatgctaatcactataatgtgggcatcaaagttgtgtgttatgtgtaattactagttatctgaataaaagagaaagagatcatccatatttcttatcctaaatgaatgtcacgtgtctttataattctttgatgaaccagatgcatttcattaaccaaatccatatacatataaatattaatcatatataattaatatcaattgggttagcaaaacaaatctagtctaggtgtgttttgcgatccgatatcgaattggccacggtaccagctgctgctgttctagggttcacaagtctgcctatttgtcttccccaatggagctatggttgtctggtctggtccttggtcgtgtcccgtttcattgtgtactatttacctgtaatgtgtatccttaagtctggtttgatggtgtctgaaacgttttgctgtggtagagcagcatggaagaactataatgaataagtgatccctaatcattgtgtccaaattttgcttctgctatacccttttgtgctgtttcttatgttttgcttaaaaatttgatctgacaaacaaatttgtctaaattatgctcttgttctgactgtgtactgtacacatttgtattgctaccggtttggcacatagttttctctttgattgcagatcaaacccttctgattgcagattgcttggctatggctgatgtgctcactgttcttctttagcttgtatattgctgatggtggcttggctacggctgaaaaagttgctgctgcgccgacttggcaactgttgctccagtaatgctttgtcctctcttcctagccgccgacttggcacttggcagctgttgctcctgtaatgcgttgttatctcttatctcttgagatgtactatgattttgaggctgtttgacttgtgccagattgccagtgctgatgctatattatctcaggtttttatgctagtatatgttttactgtgtgctgcctgtgtcgagttacgtaatctattgaaccgctatgcgtgttgatgccctgttgttgcttgccagattgatgcccctgttgcttgcagcttgcaagctgtagtgaaatcctaaaattccaaaccaaatctattctgaacttttgaagatctgtgatgtccggaagaaaagattcaaacagataaacgggactctccagaatctataaaataaatgatcgacaaacgctttgctttggtaggcttcaagcttggtcacccggtccgggcctagaaggccagcttcggccgccccgggcaactttattatacaaagttgatagataaatcagatatctggttcctaaggacccggcggaccgattaaactgattcggtccgacgcgttacctaataacttcgtatagcatacattatacgaagttattagctaactaactagtaagcttaagccatgggtcgacggatccgttaactagcgtggcatttggcaccgccgcacactatgcgagctaggagtgctagtttacagatgaaactatgaaaccaagaaaacacaattgtccgtagctagcgcgtggcgtcgtgtcaagcttcacacagtatcttcgttcttcactataaatcgcgcctgttgttcgtgagacccaccaccgtggataacagtcccctaataataagcgatcaacagcactgctgatggctgaacaccgaggcgccgccgcgcgtaaccatccgccggagcagcccgtcgtgccggcgaacgacgccttccccgaccgcgcccagcagctctgcctcgacgccgggcgcgcgctcgcgatgtgcggcgtgctcgtcgccgtccctcccgcattttacgcgtcgacgtcgcggacgacaccgcacttgccttcgtcggcttcgtcctctggatcatcggtgcgtggctgtgcctcctggcgctcacgcccttggctccacgggcggtgagggcgggcggggccgccgccagcaccttgctgatcaggtgcctgtccctttcatgaactactagcgcccgcgcccgcggccgccgggcacaagagaacacatcgatgttcgctgcgtacgtcagcaataaggcactctttgtcagtagtcgagtgcatatgttgggtgtttgccctgggagatttcaagtgttgtggccattatcccgcaggataaaaaatcggcggcttttggattgatacggaaaataacgatgtttcatgctcgtgttgtgtgtgtgacatcttgtcagccaagtttttaaccgttgctactccccctctgtgggctcagtgtgtggaccggaatacgtcgtacataggccgtagcctaagcccaatatgccgtttttcaggttggcctgtgtgacgacaagcgggtctcaaaagcccatcacgcaactggcctgcaattattggaggagagcgcgtcgagttggttccagaggctgcgtggtggggccggactctgcgacgacctctcgttcgcgtccgatttggttgccgtgagccgtgacgtaacgcctccttccgttcctccctatataagttccacccccgggtccggtttccccaagccccagtgacccccgatcccgatcgcgaaatctccgcacccgccggcaagggaccgaagcaagcctctctcccgaccgtcgcatcaaggtacgcgtccgctcgatctgtcctcttccttctcgatttgacttgctgtggtgcccgatcacgggatcagaatcgcaccagtgtagatttcgcatgttctaagatgtgttagtttccaggctaatccagttctcttgacgcccgatccgatcgagctccgtgtttatttcagcctaatcgtagtattcccctaaaatttcctcattagggggttcgcaagattgttggtcgacaggttcacttatgctcgatcgcttacttttagtcgattcatgctgcgtactattgttgccccccgtggttttatcttttctcgtgtgaaatccagtagatatagtagatatcgtagcattaggttttaattcaatcgattgattattgtatcatcaaaattgagaagttcgaatcatgcctatcatgctgcctcaaccgaaatcctgtatattgaagtttcaattcaattgattgatcattcattagattcaaccaaaatctagaaggttagatgacgcatgtcatgctgcctgcgtagtttacctttgatctgtttatgattaccttatcagtaggatatttgtgattttgggaagtagcactaactgattcatgctgacatgatgttccctttcagattatactgttgagtcctatctaattgatgctttgtatgctatatgaatacgtcatggtaaattagcagttaattagcatattagcaattgggcgtacctcatcaggattgctcttgtagatgtgtgtggtgatgtttcttgttcaattcatgttctgctttaaaagtatgtgttctctgtttgttaattaagattcatggttataatgatttggacctaattaatcagggttgcccttttagatgcgtggttacttgttgagttcatttttttcctgctatagttgtatgcgtttgttcattcatggttagatttgatttgtttcttctctattccatgccttccatatacttcaattgtagcttaacatgagatttctgtatatgcaggtcgaccgccggggatccacacgacaccatggcccagtccaagcacggcctgaccaaggagatgaccatgaagtaccgcatggagggctgcgtggacggccacaagttcgtgatcaccggcgagggcatcggctaccccttcaagggcaagcaggccatcaacctgtgcgtggtggagggcggccccttgcccttcgccgaggacatcttgtccgccgccttcatgtacggcaaccgcgtgttcaccgagtacccccaggacatcgtcgactacttcaagaactcctgccccgccggctacacctgggaccgctccttcctgttcgaggacggcgccgtgtgcatctgcaacgccgacatcaccgtgagcgtggaggagaactgcatgtaccacgagtccaagttctacggcgtgaacttccccgccgacggccccgtgatgaagaagatgaccgacaactgggagccctcctgcgagaagatcatccccgtgcccaagcagggcatcttgaagggcgacgtgagcatgtacctgctgctgaaggacggtggccgcttgcgctgccagttcgacaccgtgtacaaggccaagtccgtgccccgcaagatgcccgactggcacttcatccagcacaagctgacccgcgaggaccgcagcgacgccaagaaccagaagtggcacctgaccgagcacgccatcgcctccggctccgccttgccctccggactcagatctcgatagagtcaacctagacttgtccatcttctggattggccaacttaattaatgtatgaaataaaaggatgcacacatagtgacatgctaatcactataatgtgggcatcaaagttgtgtgttatgtgtaattactagttatctgaataaaagagaaagagatcatccatatttcttatcctaaatgaatgtcacgtgtctttataattctttgatgaaccagatgcatttcattaaccaaatccatatacatataaatattaatcatatataattaatatcaattgggttagcaaaacaaatctagtctaggtgtgttttgcgaattgcggcgcccttactttaacgcctctaaccaacacccctttatctttataaggaacaataaacagaatttgccccactgttctaaatcacctaataatatccccagctaaaaacaataaaggtttcctagaattaagacaagcatgactgttcctccaggagggtttggaacattgttgcagtcttgcagatacgggcgaagggtgagaaacagagcggagggctggaggtgacctcggtagtcgacgccggagttgagcttgacaacgacggggcggcccctgatggacttgaggaagtccgatggcgtcttcaccgtcccgccggcgcccgaggcgggcctgtcgctgccgccgccgccgctgctcatcttgcgcgctgtgcccccggcggtgtccctgtgttgcggatcgcgggtgggccaggtggatgcgagggcgacccgtttggactccggccggagccgccggatccctggtcggtgtcagtgccgtttactctgggccccacgtgtcagtaccgtctgtagatgacaacaacccgtcgtccacagtcatgtccaaaatatcctttcttcttttttttcgattcggatatctatcttccttttttttttccaaaaatcttcttgacgcaccagcgcgcacgtttgtggtaaacgccgacacgtcggtcccacgtcgatagaccccacccaccagtgagtagcgtgtacgtattcgggggtgacggacgtgtcgccgtcgtcttgctagtcccattcccatctgagccacacatctctgaacaaaaaaaaggagggaggcctccacgcacatccccctccgtgccacccgccccaaaccctcgcgccgcctccgagacagccgccgcaaccatggccaccgccgccgccgcgtctaccgcgctcactggcgccactaccgctgcgcccaaggcgaggcgccgggcgcacctcctggccacccgccgcgccctcgccgcgcccatcaggtgctcagcggcgtcacccgccatgccgatggctcccccggccaccccgctccggccgtggggccccaccgagccccgcaagggtgctgacatcctcgtcgagtccctcgagcgctgcggcgtccgcgacgtcttcgcctaccccggcggcgcgtccatggagatccaccaggcactcacccgctcccccgtcatcgccaaccacctcttccgccacgagcaaggggaggcctttgccgcctccggctacgcgcgctcctcgggccgcgtcggcgtctgcatcgccacctccggccccggcgccaccaacctagtctccgcgctcgccgacgcgctgctcgattccgtccccatggtcgccatcacgggacaggtggcgcgacgcatgattggcaccgacgccttccaggagacgcccatcgtcgaggtcacccgctccatcaccaagcacaactacctggtcctcgacgtcgacgacatcccccgcgtcgtgcaggaggctttcttcctcgcctcctctggtcgaccagggccggtgcttgtcgacatccccaaggacatccagcagcagatggcggtgcctgtctgggacaagcccatgagtctgcctgggtacattgcgcgccttcccaagccccctgcgactgagttgcttgagcaggtgctgcgtcttgttggtgaatcgcggcgccctgttctttatgtgggcggtggctgcgcagcatctggtgaggagttgcgacgctttgtggagctgactggaatcccggtcacaactactcttatgggcctcggcaacttccccagcgacgacccactgtctctgcgcatgctaggtatgcatgggacggtgtatgcaaattatgcagtggataaggccgatctgttgcttgcacttggtgtgcggtttgatgatcgcgtgacagggaagattgaggcttttgcaagcagggctaagattgtgcacgttgatattgatccggctgagattggcaagaacaagcagccacatgtgtccatctgtgcagatgttaagcttgctttgcagggcatgaatgctcttcttgaaggaagcacatcaaagaagagctttgactttggctcatggaacgatgagttggatcagcagaagagggaattcccccttgggtataaaacatctaatgaggagatccagccacaatatgctattcaggttcttgatgagctgacgaaaggcgaggccatcatcggcacaggtgttgggcagcaccagatgtgggcggcacagtactacacttacaagcggccaaggcagtggttgtcttcagctggtcttggggctatgggatttggtttgccggctgctgctggtgcttctgtggcaaacccaggtgtcactgttgttgacatcgatggagatggtagctttctcatgaacgttcaggagctagctatgatccgaattgagaacctcccagtgaaggtctttgtgctaaacaaccagcacctggggatggtggtgcagttggaggacaggttctataaggccaacagagcgcacacatacttgggaaacccagagaatgaaagtgagatatatccagatttcgtgacgatcgccaaagggttcaacattccagcggtccgtgtgacaaagaagaacgaagtccgcgcagcgataaagaagatgctcgagactccagggccgtacctcttggatataatcgtcccacaccaggagcatgtgttgcctatgatccctagtggtggggctttcaaggatatgatcctggatggtgatggcaggactgtgtactgactagctagtcagttaacagatctgccagatcctcggtgtacaaataacccgtcttatcctatgagacgggccggcgtcagtgtgttctggaggaatttttatgtcagagcctttttctttgtgtgcttgatgtagatgccaagggaagcttattggctgttgaagcttgatgcaaaataaattatggaactctgttttttgtttatctaataataactagcaaatatgcttccattgcattgaaactaacagccttttgtgtttccaagttttattttgtgacaatgtcatctatttcaattagttgtggaatcggaaacttgcaggactaacttggaaactccaatccctcagcatcctggactttttcctggtgtaatccatgtagatattattttaatcatcattttagttctggaggtttttccatctccggttttgctcccctttcttcaaaaaaaaaaaaaaaatgccgtaggcgccgcaacgcccacctgttgttcaaactcatgggcacgagtggctcgaagattttatacaacaattgctgtagtttcaccgttgctggtgaagaagcatttttttaaaaaaatatagtggtattcattttaattagtttagttgtgcagcgagcaaaatttggacatgctctgctcggaatctgatcgacctagacacagattagcagcagtagctttgtcatctgttccaagagttgcgatctgatagaagaaaaaaaaaccttcccttcaatgtaaaaccgaaactaacaagaaagaagcacagtgccgtttaggcaagtatggagtacgtattaagcatgtagaaggccatgcatgaaccactaacaagaaagaagcgcagtgccattcaggcaagcataagcatgtagattggcatgcatgaacaactaacagtagatcgtctctggtctgattagaagttttttgggaagccaagaaatcatgtacaactggttccatctcaaattccgtggcaaaaagaggcctaagcaacatacctcgagtagatcacattcaagcttggtcacccggtccgtcaatattctgattccgatgacttcgtaggttcctagctcaagccgctcgtgtccaagcgtcacttacgattagctaatgattacggcatctaggaccgactagtggcgcgccgactagctagctaaggtaccgagctcgaattcattccgattaatcgtggcctcttgctcttcaggatgaagagctatgtttaaacgtgcaagcgctactagacaattcagtacattaaaaacgtccgcaatgtgttattaagttgtctaagcgtcaatttgtttacaccacaatatatcctgcca

SEQ ID NO: 267 - DNA, 21787 bp, synthetic construct
  misc_feature 1..21787: note = PHP99680
  source 1..21787: mol_type = other DNA
gtttacccgccaatatatcctgtcaaacactgatagtttaaactgaaggcgggaaacgacaatctgatcatgagcggagaattaagggagtcacgttatgacccccgccgatgacgcgggacaagccgttttacgtttggaactgacagaaccgcaacgttgaaggagccactcagcaagctggtacgattgtaatacgactcactatagggcgaattgagcgctgtttaaacgctcttcaactggaagagcggttacgctgtttaaacgctcttcaactggaagagcggttactaccggttcactagctagctgctaatcgagctagttaccctatgaggtgacatgaagcgctcacggttactatgacggttagcttcacgactgttggtggcagtagcgtacgacttagctatagttccggacttacccttaagcgatttaaatctgcggttaccgaattcgagctcggtacctagtacccttgtacttttggtttcacctgcatagagaaaacccacaagaatatgacagtctgatttgtcagtctcattctcaagcaacatttctctatccgttactttcatggtgaataacacaatccatcatcaatactttgtgttactcagaaactgaaagttattccgagtcttgcatatctttggacctactcgtttttctaccattattgctgattgttaagctctcgctacttgaatcggcattgttggagtgggaaggttcaaaaaattggagttatgactagttgtctctttctatgtacgatggagaaaatgaataaacaactgagaaaatggctcttgtttagttgatgatgctcttaagctttccactggttgccatatatgatttgggcatttcactttgatcttaatgggccttgtaaagcccaagactcatgattatctttagttgatgctcttaattaggtgtgggcaaataattcaaactgtatgtacccgaccaaaaccaaagcaaaaataatcgaaccaaaccgaaaatttaaaaataaccgaatgaaaactaaatcctataactgaaagaactgaaaccgaatcaaaatatttaatgtaaccaaaaatatccgaaatataattatattgtcaaaaatattaataatttctagattaaataattaaaaatacttaaaaatttatataaaatagtaaaaatactcgaaaataaccacaaatattcaaaaacaaccgaaatatcccaaaatattcaaagcaaaataaccgaatggataccaaattttaaaaccgaaaaaactggaacaaaaccaaaatcgaaccaaaatttcaaaaatcgaataaatactaaactttagaacaaaaaaaaacgataaccgaatgtatacgaaccaaagccgaattagataaccgaacgtccaggactactcttaatctttccgccacttatgatttgggctattactttgtttataatgagccttttcaagctcaagttcatgattgtccgtgagatgagaaactgacttgttggattcgaaaccctagctagtattggttaatacttaatacataaatgacctgcattgacatcatcatccaagaaaataaaaattgtatgcttgagatatttagttttcctagctaggttttctttattttagtaccgaatctttaggtgtgccacgttaatttagacccattttttcatacttaccaactgagtctagtttaatcatgactataatcgtataaaatgattcagtcgacgtcattgcgaacgtatataaaatcatccaaattgacgtcattccaaagaggtaagcatgcttatctaagagtccgagcatactaaacaagacgacattttatttgcactccaaatcaaattttgtattgcctaaagaaaaacaatcaaactcaagtttcttaaaattaatttcattcaaactaatcactttcaatatctcacatattattcatgccatttctatttgtctaaacatgatttaaaaaaaaaagtaaaatacaaagattactatgcaaaaactctataaaaaaaaattcaaatttcttatttatttgtgacatcaaattttcaaaataatttttttaattatcggttgatccggtcagtcgataaaaacataaactttcagcgaccgttaaaactttcctactaccgatttagagaaaatcttagcttgaaacgtaattgtaacctgccttcatgcaagtcgcaagatatgtcatcctaagttgtatatgttttctcaaaagatgtatttacttgagaaaatacgtttcaacgttgatggacaaccaattaagaatcaagcacctttcgtaatcaatttaggcttatcgtctaaggtatactgatttacgacagttgactagacttataaggaacaaaataatagaatagtttctaaacacttcacctaatcatagagactaagatggtaattcgtaaacgacaaagcctagtgacactgtccattgtaaaattccacatcatattagtattaaacatatacatgtagtttcctgaacacatgtagtatcaaacacacttcgtggcttcttcctcgaaacctgcggccgcgctatagttccggacttacccttaagataacttcgtatagcatacattatacgaagttatgggcccacgcgtgaagagcggttaccagagctggtcacctttgtccaccaagatggaactgtcttcggccagaatggccatctggattcagcaggcctagaaggccatttatcgctatcaactttgtatagaaaagttgggccgaattcgagctcggtacggccagaatggcccggaccgaagcttgcggccgcacactgatagtttaaactgaaggcgggaaacgacaatctgatcatgagcggagaattaagggagtcacgttatgacccccgccgatgacgcgggacaagccgttttacgtttggaactgacagaaccgcaacgttgaaggagccactcagccgcgggtttctggagtttaatgagctaagcacatacgtcagaaaccattattgcgcgttcaaaagtcgcctaaggtcactatcagctagcaaatatttcttgtcaaaaatgctccactgacgttccataaattcccctcggtatccaattagagtctcatattcactctcccgggggatctcgactctagaggatcgctcaggaaggccgctgagatagaggcatggcggccaatgcgggcggcggtggagcgggaggaggcagcggcagcggcagcgtggctgcgccggcggtgtgccgccccagcggctcgcggtggacgccgacgccggagcagatcaggatgctgaaggagctctactacggctgcggcatccggtcgcccagctcggagcagatccagcgcatcaccgccatgctgcggcagcacggcaagatcgagggcaagaacgtcttctactggttccagaaccacaaggcccgcgagcgccagaagcgccgcctcaccagcctcgacgtcaacgtgcccgccgccggcgcggccgacgccaccaccagccaactcggcgtcctctcgctgtcgtcgccgccgccttcaggcgcggcgcctccctcgcccaccctcggcttctacgccgccggcaatggcggcggatcggctgtgctgctggacacgagttccgactggggcagcagcggcgctgccatggccaccgagacatgcttcctgcaggactacatgggcgtgacggacacgggcagctcgtcgcagtggccacgcttctcgtcgtcggacacgataatggcggcggccgcggcgcgggcggcgacgacgcgggcgcccgagacgctccctctcttcccgacctgcggcgacgacggcggcagcggtagcagcagctacttgccgttctggggtgccgcgtccacaactgccggcgccacttcttccgttgcgatccagcagcaacaccagctgcaggagcagtacagcttttacagcaacagcaacagcacccagctggccggcaccggcaaccaagacgtatcggcaacagcagcagcagccgccgccctggagctgagcctcagctcatggtgctccccttaccctgctgcagggagtatgtgagagcaacgcgagctgccactgctcttcactgatgtctctggaatggaaggaggaggaagtgagcatagcgttggtgcgttgctgtcaagggcgaattcacatggttaacctagacttgtccatcttctggattggccaacttaattaatgtatgaaataaaaggatgcacacatagtgacatgctaatcactataatgtgggcatcaaagttgtgtgttatgtgtaattactagttatctgaataaaagagaaagagatcatccatatttcttatcctaaatgaatgtcacgtgtctttataattctttgatgaaccagatgcatttcattaaccaaatccatatacatataaatattaatcatatataattaatatcaattgggttagcaaaacaaatctagtctaggtgtgttttgcgaatgcggccgccaccgcggtggagctcgaattccggtccgggcctagaaggccagcttcaagtttgtacaaaaaagcaggctccggccagaatggcccggaccgggttaccgaattcgagctcggtaccatttaaatgccttcagttggttttgctcctttttatttaaaccctttcttggactttttattggtttgtgttgaacctttggcacctgtagaacttataatctagagcaaactagttagtccaattatttgtgttgggcaattcaaccaccaaaattatttaggaaaaggtttgagcctatttccctttcagccgccacccttgccgtcgtcgtcgccattgttgccatcgtcctcgttgcatgctcacgatgaggttgtacctgatggatcgcgcagagcatgctcacgatgaggttgaggtatggcgtgttctgtacgacttcatcctctgtcaatgctcttgcgtcaccttccatcatgcgtgggcatgcaccaggtatggcgtgttgtcatgtactttctggtacattggttgttactatggaggctttgttgctgtggtctcccttggtactgcatacatggcctaaacacggttgggtgatgttgtgtcttgtcgcggaagtcgtggatcgatggtgtctgtctgggttccctccttgcgggttcgcgtggcggggactcgatcgtccgtcctgcctcgtaggcttgcctgacgaggacttggtcgttcgtcctgcctcgcaggcttgctcggcgaggacttggtcgttcctcccacctcgcggacttgctcggcaaatgggtcgtggagagtatgggcctcactatgggcaccccatttcctggtacccgacatagtgactaaaagtgactaaaatgagctttttaccccaccacctgccctcccccacgtgagctatgcgctgaacgagcaaagaagtaaataggggtaatgcagtaaatatacgtagtagttaatgctctttagtcagatttagtcactgacaccaaacgagatactttagtgactactaaagtttagtcaggtgactaaagaaaccaaacataacccttagtgtgaaccgatttaggcacactagcatatatcccgtgttaacgctacgatcttgaagagggaggagtcaacgacggcggtggcgcaagtggataagttgacgacagcgacgatgacaatgtgagtgaggagaagggggcagtggggacgcagaggatggaagagggggagggggtggataggggcagcagggtgggaggagggagagcgcgagtgagggagagagggcgccgggacgcatgggaagaggaagagatgaatcaaataatattatatattaaatttgagtaagtaagagagatttatctaacgatccgaattgttggttttgatgatctgttaagtttaggtgtaatttgtttgatggatttagtgatgattatatgtgtgggggtgatttagtttggttggttttacaaaagtttaaattttttttagattatatagtggtatagatagtcaaacagtagcggcaatgacatcacggtaaatgcgcgttggcatccaaatgcagctggacacaggtcacacagcctaacggatatatcatatatgtgaatcctaactgtacactgtctgaagtggacgaacggctctggcttcggcgtgttacgtgtatagtaggccccttttgaacgaacggcgcgggccggggccaccaccagcatctgcggcagggagaatcgcgttggttcgacgcaaacgctacccggcgcccccttgcccttggggccggctattttaccgcacccgttctcccctctctaccgcagatcagatcacactcgtagagagaaggaaaaatatccccaaaccctagctcccgatctcgggatccatggccactgtgaacaactggctcgctttctccctctccccgcaggagctgccgccctcccagacgacggactccacactcatctcggccgccaccgccgaccatgtctccggcgatgtctgcttcaacatcccccaagattggagcatgaggggatcagagctttcggcgctcgtcgcggagccgaagctggaggacttcctcggcggcatctccttctccgagcagcatcacaaggccaactgcaacatgatacccagcactagcagcacagtttgctacgcgagctcaggtgctagcaccggctaccatcaccagctgtaccaccagcccaccagctcagcgctccacttcgcggactccgtaatggtggcttcctcggccggtgtccacgacggcggtgccatgctcagcgcggccgccgctaacggtgtcgctggcgctgccagtgccaacggcggcggcatcgggctgtccatgattaagaactggctgcggagccaaccggcgcccatgcagccgagggtggcggcggctgagggcgcgcaggggctctctttgtccatgaacatggcggggacgacccaaggcgctgctggcatgccacttctcgctggagagcgcgcacgggcgcccgagagtgtatcgacgtcagcacagggtggagccgtcgtcgtcacggcgccgaaggaggatagcggtggcagcggtgttgccggcgctctagtagccgtgagcacggacacgggtggcagcggcggcgcgtcggctgacaacacggcaaggaagacggtggacacgttcgggcagcgcacgtcgatttaccgtggcgtgacaaggcatagatggactgggagatatgaggcacatctttgggataacagttgcagaagggaagggcaaactcgtaagggtcgtcaagtctatttaggtggctatgataaagaggagaaagctgctagggcttatgatcttgctgctctgaagtactggggtgccacaacaacaacaaattttccagtgagtaactacgaaaaggagctcgaggacatgaagcacatgacaaggcaggagtttgtagcgtctctgagaaggaagagcagtggtttctccagaggtgcatccatttacaggggagtgactaggcatcaccaacatggaagatggcaagcacggattggacgagttgcagggaacaaggatctttacttgggcaccttcagcacccaggaggaggcagcggaggcgtacgacatcgcggcgatcaagttccgcggcctcaacgccgtcaccaacttcgacatgagccgctacgacgtgaagagcatcctggacagcagcgccctccccatcggcagcgccgccaagcgcctcaaggaggccgaggccgcagcgtccgcgcagcaccaccacgccggcgtggtgagctacgacgtcggccgcatcgcctcgcagctcggcgacggcggagccctggcggcggcgtacggcgcgcactaccacggcgccgcctggccgaccatcgcgttccagccgggcgccgccagcacaggcctgtaccacccgtacgcgcagcagccaatgcgcggcggcgggtggtgcaagcaggagcaggaccacgcggtgatcgcggccgcgcacagcctgcaggacctccaccacctgaacctgggcgcggccggcgcgcacgactttttctcggcagggcagcaggccgccgccgctgcgatgcacggcctgggtagcatcgacagtgcgtcgctcgagcacagcaccggctccaactccgtcgtctacaacggcggggtcggcgacagcaacggcgccagcgccgtcggcggcagtggcggtggctacatgatgccgatgagcgctgccggagcaaccactacatcggcaatggtgagccacgagcaggtgcatgcacgggcctacgacgaagccaagcaggctgctcagatggggtacgagagctacctggtgaacgcggagaacaatggtggcggaaggatgtctgcatgggggactgtcgtgtctgcagccgcggcggcagcagcaagcagcaacgacaacatggccgccgacgtcgggcatggcggcgcgcagctcttcagtgtctggaacgacacttaagcgtacgtgccggcctggctctccgaaagggcgtattccagcacactggcggccgttactagacccaacctagacttgtccatcttctggattggccaacttaattaatgtatgaaataaaaggatgcacacatagtgacatgctaatcactataatgtgggcatcaaagttgtgtgttatgtgtaattactagttatctgaataaaagagaaagagatcatccatatttcttatcctaaatgaatgtcacgtgtctttataattctttgatgaaccagatgcatttcattaaccaaatccatatacatataaatattaatcatatataattaatatcaattgggttagcaaaacaaatctagtctaggtgtgttttgcgaatgcggcctccgggcacccagctttcttgtacaaagtggccgttaacggatcggccagaatggcccggaccgggttaccccgcggttcaaagccaatgactgttgttaggtccagtttctaaggacgaatcatccaatcactggttctttctgaacaaaacaaagagctatagagttacgttactgtagccgagacagagcctgcaatctggttatgccacatactaggttctttcttaaagttgactcactctatcctaagttctacttacaaggagctacaacaaattggtcataaccggagagcgttcaaggaggtaatatcccatcttactctgtagcaaggctacaaaaggagagctaaagaactaggctacaaaaagagagctaaagaactaactatctagcaagactacagagctatagtgtagagatttcataaccggtgagcgttcaaggatactttgaagagaagaggtaatatctcaactagcaagactacaaaaaaatggagatataaaactaactgtctaacaagactacagagctatagtagagatagatacgttcgacacttaagcatgagaattcgagctcggtaccctggttcacaaactcaatacaacacacagtggagtagggtattacgctccggcggcccgaaccactctaaatccttgtgtcctcgtgtgctcttccaccattaatgactgtaattgcagggacacgaagagttgtagcgcttttgccaacaagatccgctatatgctagtagagtggaacctgcacagcaacaagcatccaataatctgagaataagaattatgtgtggtgatggttctcatctctgcaactcgccattttcgcgagagaaccaaatccaagttggtgaagatcatgatttgggctcatgggctggcatagtagctattacctttgcaattgtggttcgaatctatccgatattctccttttcagggagagctaatgcttatgcttattgggtattttggtttgacactgcttcacgcccaaaaaaaggcaactatgtctgagttggatatggcccaaaaaaaggcagctatgtctgagttggatatggaagtcttctttcgtttagggtgaagtaagaccaagctcatgagcttattatcttaggtcggaacaaattagttgataggcatggcacatttatcaaattataatgattttaacagaaaagcaacacctctttttcagcagcaccagctttgcaagctgcaattgacactccaagcatagtatttgctccaaactcagcctgcatttcgcacaatatcatatctatttccatttggataaaatatattttccagaaatatgggaacagaatcaagatacagaaaaaagttgtggtagtagtggtaagtggaaacacaagtacagtgaaaagatagcattatttctgaacagtcaaattaaccgaaataagtagtatcacatactgcccctaaattgactacacccaatgtaaagaattgcttgagcatattgagccatcagttgtttgtttgtgtaacggatttgacaatgcagagttcaggagcaaaaaaccgcaaaggagagaaagagggaaaggatctcctagtatcccaccttgtggcgcgccctgtcaagtgcatgatggcctggtcgatctgcgtctgctgctgcggttccatcccaacgagtgcctccgacaccttgtcgttgatcacccgcaccgcgtaggcgacccccctggcgaggaacttccgcctctcggaggccccggccgcgtcggcggcggcgccctcgagcgcgcccacgctagccgtagatgctcggtgcacggccttgttggtgtgcaactcgacctcaacggccggtgcgctacgcccgtcaaggatctggcgcgcccgcaccctcgtgatcacggtgggcgcctcccgcctcatgtggccgacgatgaaaagcgccgggttaggggccttggcgcgcaccgccgtattcagggcctcctcgctcttgcgcgagagcaggtgcttccccaggtactcctgcactgacaaggctgccacagcggtggaatttgtcctcacgacttcgccacgtcgtcctcacctccctggcttcccacgactccgccgtatcgaggtgctcggtgggtcgtcttaatccgaagtccgaactaggaagacgagacagagaggtctgaggaatgggcctcgtttgatgttgagctgaattatttttccagcataagcccaggtcttggtccatgaacaaaattactagaaacccagcccagtactacgatctaaaagagggactgccactggatagctctctctagcattctccacgctccaatacagcggcgtcgtgtctatccgggtctatccgcgaacacgtgagaactctccagaaactgctttctcctccacttcatctctctcgctttccctctataaaaagaccccttctaggaattgagggagacagcaagcaccaagcagcgatccgaagctcaatcaattcactcaaacctcttccccaaatcttcgattagatcttcgttgacaagaagactagaaccgaacctgacatgtccaacctgctcacggttcaccagaaccttccggctcttccagtggacgcgacgtccgatgaagtcaggaagaacctcatggacatgttccgcgacaggcaagcgttcagcgagcacacctggaagatgctgctctccgtctgccgctcctgggctgcatggtgcaagctgaacaacaggaagtggttccccgctgagcccgaggacgtgagggattaccttctgtacctgcaagcgcgaggtttgtttctgcttctacctttgatatatatataataattatcattaattagtagtaatataatatttcaaatatttttttcaaaataaaagaatgtagtatatagcaattgcttttctgtagtttataagtgtgtatattttaatttataacttttctaatatatgaccaaaacatggtgatgcctaggtctggcagtgaagaccatccagcaacaccttggacaactgaacatgcttcacaggcgctccggcctcccgcgccccagcgactcgaacgccgtgagcctcgtcatgcgccgcatcaggaaggaaaacgtcgatgccggcgaaagggcaaagcaggccctcgcgttcgagaggaccgatttcgaccaggtccgcagcctgatggagaacagcgacaggtgccaggacattaggaacctggcgttcctcggaattgcatacaacacgctcctcaggatcgcggaaattgcccgcattcgcgtgaaggacattagccgcaccgacggcggcaggatgcttatccacattggcaggaccaagacgctcgtttccaccgcaggcgtcgaaaaggccctcagcctcggagtgaccaagctcgtcgaacgctggatctccgtgtccggcgtcgcggacgacccaaacaactacctcttctgccgcgtccgcaagaacggggtggctgcccctagcgccaccagccaactcagcacgagggccttggaaggtattttcgaggccacccaccgcctgatctacggcgcgaaggatgacagcggtcaacgctacctcgcatggtccgggcactccgcccgcgttggagctgctagggacatggcccgcgccggtgtttccatccccgaaatcatgcaggcgggtggatggacgaacgtgaacattgtcatgaactacattcgcaaccttgacagcgagacgggcgcaatggttcgcctcctggaagatggtgactgaggtacccaacctagacttgtccatcttctggattggccaacttaattaatgtatgaaataaaaggatgcacacatagtgacatgctaatcactataatgtgggcatcaaagttgtgtgttatgtgtaattactagttatctgaataaaagagaaagagatcatccatatttcttatcctaaatgaatgtcacgtgtctttataattctttgatgaaccagatgcatttcattaaccaaatccatatacatataaatattaatcatatataattaatatcaattgggttagcaaaacaaatctagtctaggtgtgttttgcgatccgatatcgaattggccacggtaccagctgctgctgttctagggttcacaagtctgcctatttgtcttccccaatggagctatggttgtctggtctggtccttggtcgtgtcccgtttcattgtgtactatttacctgtaatgtgtatccttaagtctggtttgatggtgtctgaaacgttttgctgtggtagagcagcatggaagaactataatgaataagtgatccctaatcattgtgtccaaattttgcttctgctatacccttttgtgctgtttcttatgttttgcttaaaaatttgatctgacaaacaaatttgtctaaattatgctcttgttctgactgtgtactgtacacatttgtattgctaccggtttggcacatagttttctctttgattgcagatcaaacccttctgattgcagattgcttggctatggctgatgtgctcactgttcttctttagcttgtatattgctgatggtggcttggctacggctgaaaaagttgctgctgcgccgacttggcaactgttgctccagtaatgctttgtcctctcttcctagccgccgacttggcacttggcagctgttgctcctgtaatgcgttgttatctcttatctcttgagatgtactatgattttgaggctgtttgacttgtgccagattgccagtgctgatgctatattatctcaggtttttatgctagtatatgttttactgtgtgctgcctgtgtcgagttacgtaatctattgaaccgctatgcgtgttgatgccctgttgttgcttgccagattgatgcccctgttgcttgcagcttgcaagctgtagtgaaatcctaaaattccaaaccaaatctattctgaacttttgaagatctgtgatgtccggaagaaaagattcaaacagataaacgggactctccagaatctataaaataaatgatcgacaaacgctttgctttggtaggcttcaagcttggtcacccggtccgggcctagaaggccagcttcggccgccccgggcaactttattatacaaagttgatagataaatcagatatctggttcctaaggacccggcggaccgattaaactgattcggtccgacgcgttacctaataacttcgtatagcatacattatacgaagttattagctaactaactagtaagcttaagccatgggtcgacggatccgttaactagcgtggcatttggcaccgccgcacactatgcgagctaggagtgctagtttacagatgaaactatgaaaccaagaaaacacaattgtccgtagctagcgcgtggcgtcgtgtcaagcttcacacagtatcttcgttcttcactataaatcgcgcctgttgttcgtgagacccaccaccgtggataacagtcccctaataataagcgatcaacagcactgctgatggctgaacaccgaggcgccgccgcgcgtaaccatccgccggagcagcccgtcgtgccggcgaacgacgccttccccgaccgcgcccagcagctctgcctcgacgccgggcgcgcgctcgcgatgtgcggcgtgctcgtcgccgtccctcccgcattttacgcgtcgacgtcgcggacgacaccgcacttgccttcgtcggcttcgtcctctggatcatcggtgcgtggctgtgcctcctggcgctcacgcccttggctccacgggcggtgagggcgggcggggccgccgccagcaccttgctgatcaggtgcctgtccctttcatgaactactagcgcccgcgcccgcggccgccgggcacaagagaacacatcgatgttcgctgcgtacgtcagcaataaggcactctttgtcagtagtcgagtgcatatgttgggtgtttgccctgggagatttcaagtgttgtggccattatcccgcaggataaaaaatcggcggcttttggattgatacggaaaataacgatgtttcatgctcgtgttgtgtgtgtgacatcttgtcagccaagtttttaaccgttgctactccccctctgtgggctcagtgtgtggaccggaatacgtcgtacataggccgtagcctaagcccaatatgccgtttttcaggttggcctgtgtgacgacaagcgggtctcaaaagcccatcacgcaactggcctgcaattattggaggagagcgcgtcgagttggttccagaggctgcgtggtggggccggactctgcgacgacctctcgttcgcgtccgatttggttgccgtgagccgtgacgtaacgcctccttccgttcctccctatataagttccacccccgggtccggtttccccaagccccagtgacccccgatcccgatcgcgaaatctccgcacccgccggcaagggaccgaagcaagcctctctcccgaccgtcgcatcaaggtacgcgtccgctcgatctgtcctcttccttctcgatttgacttgctgtggtgcccgatcacgggatcagaatcgcaccagtgtagatttcgcatgttctaagatgtgttagtttccaggctaatccagttctcttgacgcccgatccgatcgagctccgtgtttatttcagcctaatcgtagtattcccctaaaatttcctcattagggggttcgcaagattgttggtcgacaggttcacttatgctcgatcgcttacttttagtcgattcatgctgcgtactattgttgccccccgtggttttatcttttctcgtgtgaaatccagtagatatagtagatatcgtagcattaggttttaattcaatcgattgattattgtatcatcaaaattgagaagttcgaatcatgcctatcatgctgcctcaaccgaaatcctgtatattgaagtttcaattcaattgattgatcattcattagattcaaccaaaatctagaaggttagatgacgcatgtcatgctgcctgcgtagtttacctttgatctgtttatgattaccttatcagtaggatatttgtgattttgggaagtagcactaactgattcatgctgacatgatgttccctttcagattatactgttgagtcctatctaattgatgctttgtatgctatatgaatacgtcatggtaaattagcagttaattagcatattagcaattgggcgtacctcatcaggattgctcttgtagatgtgtgtggtgatgtttcttgttcaattcatgttctgctttaaaagtatgtgttctctgtttgttaattaagattcatggttataatgatttggacctaattaatcagggttgcccttttagatgcgtggttacttgttgagttcatttttttcctgctatagttgtatgcgtttgttcattcatggttagatttgatttgtttcttctctattccatgccttccatatacttcaattgtagcttaacatgagatttctgtatatgcaggtcgaccgccggggatccacacgacaccatggcccagtccaagcacggcctgaccaaggagatgaccatgaagtaccgcatggagggctgcgtggacggccacaagttcgtgatcaccggcgagggcatcggctaccccttcaagggcaagcaggccatcaacctgtgcgtggtggagggcggccccttgcccttcgccgaggacatcttgtccgccgccttcatgtacggcaaccgcgtgttcaccgagtacccccaggacatcgtcgactacttcaagaactcctgccccgccggctacacctgggaccgctccttcctgttcgaggacggcgccgtgtgcatctgcaacgccgacatcaccgtgagcgtggaggagaactgcatgtaccacgagtccaagttctacggcgtgaacttccccgccgacggccccgtgatgaagaagatgaccgacaactgggagccctcctgcgagaagatcatccccgtgcccaagcagggcatcttgaagggcgacgtgagcatgtacctgctgctgaaggacggtggccgcttgcgctgccagttcgacaccgtgtacaaggccaagtccgtgccccgcaagatgcccgactggcacttcatccagcacaagctgacccgcgaggaccgcagcgacgccaagaaccagaagtggcacctgaccgagcacgccatcgcctccggctccgccttgccctccggactcagatctcgatagagtcaacctagacttgtccatcttctggattggccaacttaattaatgtatgaaataaaaggatgcacacatagtgacatgctaatcactataatgtgggcatcaaagttgtgtgttatgtgtaattactagttatctgaataaaagagaaagagatcatccatatttcttatcctaaatgaatgtcacgtgtctttataattctttgatgaaccagatgcatttcattaaccaaatccatatacatataaatattaatcatatataattaatatcaattgggttagcaaaacaaatctagtctaggtgtgttttgcgaattgcggcgcccttactttaacgcctctaaccaacacccctttatctttataaggaacaataaacagaatttgccccactgttctaaatcacctaataatatccccagctaaaaacaataaaggtttcctagaattaagacaagcatgactgttcctccaggagggtttggaacattgttgcagtcttgcagatacgggcgaagggtgagaaacagagcggagggctggaggtgacctcggtagtcgacgccggagttgagcttgacaacgacggggcggcccctgatggacttgaggaagtccgatggcgtcttcaccgtcccgccggcgcccgaggcgggcctgtcgctgccgccgccgccgctgctcatcttgcgcgctgtgcccccggcggtgtccctgtgttgcggatcgcgggtgggccaggtggatgcgagggcgacccgtttggactccggccggagccgccggatccctggtcggtgtcagtgccgtttactctgggccccacgtgtcagtaccgtctgtagatgacaacaacccgtcgtccacagtcatgtccaaaatatcctttcttcttttttttcgattcggatatctatcttccttttttttttccaaaaatcttcttgacgcaccagcgcgcacgtttgtggtaaacgccgacacgtcggtcccacgtcgatagaccccacccaccagtgagtagcgtgtacgtattcgggggtgacggacgtgtcgccgtcgtcttgctagtcccattcccatctgagccacacatctctgaacaaaaaaaaggagggaggcctccacgcacatccccctccgtgccacccgccccaaaccctcgcgccgcctccgagacagccgccgcaaccatggccaccgccgccgccgcgtctaccgcgctcactggcgccactaccgctgcgcccaaggcgaggcgccgggcgcacctcctggccacccgccgcgccctcgccgcgcccatcaggtgctcagcggcgtcacccgccatgccgatggctcccccggccaccccgctccggccgtggggccccaccgagccccgcaagggtgctgacatcctcgtcgagtccctcgagcgctgcggcgtccgcgacgtcttcgcctaccccggcggcgcgtccatggagatccaccaggcactcacccgctcccccgtcatcgccaaccacctcttccgccacgagcaaggggaggcctttgccgcctccggctacgcgcgctcctcgggccgcgtcggcgtctgcatcgccacctccggccccggcgccaccaacctagtctccgcgctcgccgacgcgctgctcgattccgtccccatggtcgccatcacgggacaggtggcgcgacgcatgattggcaccgacgccttccaggagacgcccatcgtcgaggtcacccgctccatcaccaagcacaactacctggtcctcgacgtcgacgacatcccccgcgtcgtgcaggaggctttcttcctcgcctcctctggtcgaccagggccggtgcttgtcgacatccccaaggacatccagcagcagatggcggtgcctgtctgggacaagcccatgagtctgcctgggtacattgcgcgccttcccaagccccctgcgactgagttgcttgagcaggtgctgcgtcttgttggtgaatcgcggcgccctgttctttatgtgggcggtggctgcgcagcatctggtgaggagttgcgacgctttgtggagctgactggaatcccggtcacaactactcttatgggcctcggcaacttccccagcgacgacccactgtctctgcgcatgctaggtatgcatgggacggtgtatgcaaattatgcagtggataaggccgatctgttgcttgcacttggtgtgcggtttgatgatcgcgtgacagggaagattgaggcttttgcaagcagggctaagattgtgcacgttgatattgatccggctgagattggcaagaacaagcagccacatgtgtccatctgtgcagatgttaagcttgctttgcagggcatgaatgctcttcttgaaggaagcacatcaaagaagagctttgactttggctcatggaacgatgagttggatcagcagaagagggaattcccccttgggtataaaacatctaatgaggagatccagccacaatatgctattcaggttcttgatgagctgacgaaaggcgaggccatcatcggcacaggtgttgggcagcaccagatgtgggcggcacagtactacacttacaagcggccaaggcagtggttgtcttcagctggtcttggggctatgggatttggtttgccggctgctgctggtgcttctgtggcaaacccaggtgtcactgttgttgacatcgatggagatggtagctttctcatgaacgttcaggagctagctatgatccgaattgagaacctcccagtgaaggtctttgtgctaaacaaccagcacctggggatggtggtgcagttggaggacaggttctataaggccaacagagcgcacacatacttgggaaacccagagaatgaaagtgagatatatccagatttcgtgacgatcgccaaagggttcaacattccagcggtccgtgtgacaaagaagaacgaagtccgcgcagcgataaagaagatgctcgagactccagggccgtacctcttggatataatcgtcccacaccaggagcatgtgttgcctatgatccctagtggtggggctttcaaggatatgatcctggatggtgatggcaggactgtgtactgactagctagtcagttaacagatctgccagatcctcggtgtacaaataacccgtcttatcctatgagacgggccggcgtcagtgtgttctggaggaatttttatgtcagagcctttttctttgtgtgcttgatgtagatgccaagggaagcttattggctgttgaagcttgatgcaaaataaattatggaactctgttttttgtttatctaataataactagcaaatatgcttccattgcattgaaactaacagccttttgtgtttccaagttttattttgtgacaatgtcatctatttcaattagttgtggaatcggaaacttgcaggactaacttggaaactccaatccctcagcatcctggactttttcctggtgtaatccatgtagatattattttaatcatcattttagttctggaggtttttccatctccggttttgctcccctttcttcaaaaaaaaaaaaaaaatgccgtaggcgccgcaacgcccacctgttgttcaaactcatgggcacgagtggctcgaagattttatacaacaattgctgtagtttcaccgttgctggtgaagaagcatttttttaaaaaaatatagtggtattcattttaattagtttagttgtgcagcgagcaaaatttggacatgctctgctcggaatctgatcgacctagacacagattagcagcagtagctttgtcatctgttccaagagttgcgatctgatagaagaaaaaaaaaccttcccttcaatgtaaaaccgaaactaacaagaaagaagcacagtgccgtttaggcaagtatggagtacgtattaagcatgtagaaggccatgcatgaaccactaacaagaaagaagcgcagtgccattcaggcaagcataagcatgtagattggcatgcatgaacaactaacagtagatcgtctctggtctgattagaagttttttgggaagccaagaaatcatgtacaactggttccatctcaaattccgtggcaaaaagaggcctaagcaacatacctcgagtagatcacattcaagcttggtcacccggtccgtcaatattctgattccgatgacttcgtaggttcctagctcaagccgctcgtgtccaagcgtcacttacgattagctaatgattacggcatctaggaccgactagtggcgcgccgactagctagctaaggtaccgagctcgaattcattccgattaatcgtggcctcttgctcttcaggatgaagagctatgtttaaacgtgcaagcgctactagacaattcagtacattaaaaacgtccgcaatgtgttattaagttgtctaagcgtcaatttgtttacaccacaatatatcctgcca

SEQ ID NO: 268 - DNA, 22179 bp, synthetic construct
  misc_feature 1..22179: note = PHP99569
  source 1..22179: mol_type = other DNA
gtttacccgccaatatatcctgtcaaacactgatagtttaaactgaaggcgggaaacgacaatctgatcatgagcggagaattaagggagtcacgttatgacccccgccgatgacgcgggacaagccgttttacgtttggaactgacagaaccgcaacgttgaaggagccactcagcaagctggtacgattgtaatacgactcactatagggcgaattgagcgctgtttaaacgctcttcaactggaagagcggttacgctgtttaaacgctcttcaactggaagagcggttactaccggttcactagctagctgctaatcgagctagttaccctatgaggtgacatgaagcgctcacggttactatgacggttagcttcacgactgttggtggcagtagcgtacgacttagctatagttccggacttacccttaagcgatttaaatctgcggttaccgaattcgagctcggtacctagtacccttgtacttttggtttcacctgcatagagaaaacccacaagaatatgacagtctgatttgtcagtctcattctcaagcaacatttctctatccgttactttcatggtgaataacacaatccatcatcaatactttgtgttactcagaaactgaaagttattccgagtcttgcatatctttggacctactcgtttttctaccattattgctgattgttaagctctcgctacttgaatcggcattgttggagtgggaaggttcaaaaaattggagttatgactagttgtctctttctatgtacgatggagaaaatgaataaacaactgagaaaatggctcttgtttagttgatgatgctcttaagctttccactggttgccatatatgatttgggcatttcactttgatcttaatgggccttgtaaagcccaagactcatgattatctttagttgatgctcttaattaggtgtgggcaaataattcaaactgtatgtacccgaccaaaaccaaagcaaaaataatcgaaccaaaccgaaaatttaaaaataaccgaatgaaaactaaatcctataactgaaagaactgaaaccgaatcaaaatatttaatgtaaccaaaaatatccgaaatataattatattgtcaaaaatattaataatttctagattaaataattaaaaatacttaaaaatttatataaaatagtaaaaatactcgaaaataaccacaaatattcaaaaacaaccgaaatatcccaaaatattcaaagcaaaataaccgaatggataccaaattttaaaaccgaaaaaactggaacaaaaccaaaatcgaaccaaaatttcaaaaatcgaataaatactaaactttagaacaaaaaaaaacgataaccgaatgtatacgaaccaaagccgaattagataaccgaacgtccaggactactcttaatctttccgccacttatgatttgggctattactttgtttataatgagccttttcaagctcaagttcatgattgtccgtgagatgagaaactgacttgttggattcgaaaccctagctagtattggttaatacttaatacataaatgacctgcattgacatcatcatccaagaaaataaaaattgtatgcttgagatatttagttttcctagctaggttttctttattttagtaccgaatctttaggtgtgccacgttaatttagacccattttttcatacttaccaactgagtctagtttaatcatgactataatcgtataaaatgattcagtcgacgtcattgcgaacgtatataaaatcatccaaattgacgtcattccaaagaggtaagcatgcttatctaagagtccgagcatactaaacaagacgacattttatttgcactccaaatcaaattttgtattgcctaaagaaaaacaatcaaactcaagtttcttaaaattaatttcattcaaactaatcactttcaatatctcacatattattcatgccatttctatttgtctaaacatgatttaaaaaaaaaagtaaaatacaaagattactatgcaaaaactctataaaaaaaaattcaaatttcttatttatttgtgacatcaaattttcaaaataatttttttaattatcggttgatccggtcagtcgataaaaacataaactttcagcgaccgttaaaactttcctactaccgatttagagaaaatcttagcttgaaacgtaattgtaacctgccttcatgcaagtcgcaagatatgtcatcctaagttgtatatgttttctcaaaagatgtatttacttgagaaaatacgtttcaacgttgatggacaaccaattaagaatcaagcacctttcgtaatcaatttaggcttatcgtctaaggtatactgatttacgacagttgactagacttataaggaacaaaataatagaatagtttctaaacacttcacctaatcatagagactaagatggtaattcgtaaacgacaaagcctagtgacactgtccattgtaaaattccacatcatattagtattaaacatatacatgtagtttcctgaacacatgtagtatcaaacacacttcgtggcttcttcctcgaaacctgcggccgcgctatagttccggacttacccttaagataacttcgtatagcatacattatacgaagttatgggcccacgcgtgaagagcggttaccagagctggtcacctttgtccaccaagatggaactgtcttcggccagaatggccatctggattcagcaggcctagaaggccatttatcgctatcaactttgtatagaaaagttgggccgaattcgagctcggtacggccagaatggcccggaccgaagcttgcggccgcacactgatagtttaaactgaaggcgggaaacgacaatctgatcatgagcggagaattaagggagtcacgttatgacccccgccgatgacgcgggacaagccgttttacgtttggaactgacagaaccgcaacgttgaaggagccactcagccgcgggtttctggagtttaatgagctaagcacatacgtcagaaaccattattgcgcgttcaaaagtcgcctaaggtcactatcagctagcaaatatttcttgtcaaaaatgctccactgacgttccataaattcccctcggtatccaattagagtctcatattcactctcccgggggatctcgactctagaggatcgctcaggaaggccgctgagatagaggcatggcggccaatgcgggcggcggtggagcgggaggaggcagcggcagcggcagcgtggctgcgccggcggtgtgccgccccagcggctcgcggtggacgccgacgccggagcagatcaggatgctgaaggagctctactacggctgcggcatccggtcgcccagctcggagcagatccagcgcatcaccgccatgctgcggcagcacggcaagatcgagggcaagaacgtcttctactggttccagaaccacaaggcccgcgagcgccagaagcgccgcctcaccagcctcgacgtcaacgtgcccgccgccggcgcggccgacgccaccaccagccaactcggcgtcctctcgctgtcgtcgccgccgccttcaggcgcggcgcctccctcgcccaccctcggcttctacgccgccggcaatggcggcggatcggctgtgctgctggacacgagttccgactggggcagcagcggcgctgccatggccaccgagacatgcttcctgcaggactacatgggcgtgacggacacgggcagctcgtcgcagtggccacgcttctcgtcgtcggacacgataatggcggcggccgcggcgcgggcggcgacgacgcgggcgcccgagacgctccctctcttcccgacctgcggcgacgacggcggcagcggtagcagcagctacttgccgttctggggtgccgcgtccacaactgccggcgccacttcttccgttgcgatccagcagcaacaccagctgcaggagcagtacagcttttacagcaacagcaacagcacccagctggccggcaccggcaaccaagacgtatcggcaacagcagcagcagccgccgccctggagctgagcctcagctcatggtgctccccttaccctgctgcagggagtatgtgagagcaacgcgagctgccactgctcttcactgatgtctctggaatggaaggaggaggaagtgagcatagcgttggtgcgttgctgtcaagggcgaattcacatggttaacctagacttgtccatcttctggattggccaacttaattaatgtatgaaataaaaggatgcacacatagtgacatgctaatcactataatgtgggcatcaaagttgtgtgttatgtgtaattactagttatctgaataaaagagaaagagatcatccatatttcttatcctaaatgaatgtcacgtgtctttataattctttgatgaaccagatgcatttcattaaccaaatccatatacatataaatattaatcatatataattaatatcaattgggttagcaaaacaaatctagtctaggtgtgttttgcgaatgcggccgccaccgcggtggagctcgaattccggtccgggcctagaaggccagcttcaagtttgtacaaaaaagcaggctccggccagaatggcccggaccgggttaccgaattcgagctcggtaccattattttccccccattttctcattttagaagcaacaatttactattacaatttctgttatcattttctatttttcatttacaaactgaggtcaaattcaggttttcaataaatgcatgataaccacatcatcaacaagagatgtgccattctttatttgtttattagttacttaactaatttaatactctttgttggttataaataggaagggtcctaatgaagtttcaaaggtttcaacaattctcctaacttcattataaatatatttatttatttatttatttattttatatatttttgtcacttctaccaattttgacctttagagtttataatacaaaacagtgttttgtaagtaaatacacgtttttgttgaacctaatagggtttttaccatcgagtatcagactatccacactcatataactctaaatttctaccatatgagaatatattgtacttgtcagcaaaaaactttacttataccacaattttccgtagtcatatctgctatatatctcaactctataccaaccgcaacatattatatcatttttgtctctttcctctcacctactcgcccaactcctcctggcttggtgacttctgtgcctgcacgtccaatgccatatggagaacatagaagagatggagtaagcctctccctaccacccataccttttagggtagatcgctacaacgtttcagttgctgcaaagaagacccaatatcatcaggtcgctcaatgcggatagcctcaatctatccacattcatcctactctaaaaagaatactccatcttagtcattaatattttaaaatacaatagagtcctacatctacaactattctatatctcaactcgatataactactacattttgatgaatatatatcgaacacatccggttaattgtgggcttgtggcgttgtgttcatgtcgccgccccacaaccacaagctcggcgggtcggcctcattgctgcatagcgttcgaacttcgaaccgtacaaacagtatctgaccgtttcctgtcggttgctgtaaagtagcgtcacgtatagagtagctgcagcacatttcgtacatacctcgagtagcgtagcgcaccctagtgtgtcactgtggacagcctcagggtctgtttggttgggctgtggctgtgaaaaaagttgctgtgggctgtgagctgtggaaaaagctgctgtaggctgtaagctgttaaaaagctaaaaaccgtttggtagaaaccactaaaagtcgttaaaaatccttcgatatatgttttcatagttccatccgaaaagccactaaaagcaggtccagaggtgctttcagatttgcactacaagaaaatcggtttttagaaaaagctgcttcctggatccagccctttggttggcttttggcttttaggggggcaaaagccaaagtcaaaagttaaaccaaacacaccctcagtcacccattcacatctctaccctagtgcgcttcccttataaaacctagctcctcaagctccagacgcagtcgaccgccgcagaccgggagtagtcgacgcgccgtcactgaatcctcagatcacggctagccgtaatcacgccactctgctgactcccggcgaggtactctgacgcatgcgcgagcgcttctcttcttctcttttcgctgtgcttttagtctgttcgtttgatgcccagatctactaggtttgtgtgatgagccgagccgatttatgcactggatttttagtcaagtgttgtttccgcctccgctatctttagtgtctatgtctgaatttgggttcagtgattatcgagctataaattatagttgttgcgctgttctatactagatccagttaccgatctatgatattacggggttgagcgattcatgtgctggagtactagtccaagatttgcttccgtctcctcatctacctttagtatgtactctgtatataaacttaattgcagtttgcaactgattctcggccatatattacttccgttgcgttgttcattagatccatttccgatccctgatattacgtgggtggggggtacttcgactttgttttttccggattgtttgattactggtctattcccatacatatttgtttctcattgattttatataattttgatgtaagcagcagtgtaacattttccttcagccccatggccactgtgaacaactggctcgctttctccctctccccgcaggagctgccgccctcccagacgacggactccacactcatctcggccgccaccgccgaccatgtctccggcgatgtctgcttcaacatcccccaagattggagcatgaggggatcagagctttcggcgctcgtcgcggagccgaagctggaggacttcctcggcggcatctccttctccgagcagcatcacaaggccaactgcaacatgatacccagcactagcagcacagtttgctacgcgagctcaggtgctagcaccggctaccatcaccagctgtaccaccagcccaccagctcagcgctccacttcgcggactccgtaatggtggcttcctcggccggtgtccacgacggcggtgccatgctcagcgcggccgccgctaacggtgtcgctggcgctgccagtgccaacggcggcggcatcgggctgtccatgattaagaactggctgcggagccaaccggcgcccatgcagccgagggtggcggcggctgagggcgcgcaggggctctctttgtccatgaacatggcggggacgacccaaggcgctgctggcatgccacttctcgctggagagcgcgcacgggcgcccgagagtgtatcgacgtcagcacagggtggagccgtcgtcgtcacggcgccgaaggaggatagcggtggcagcggtgttgccggcgctctagtagccgtgagcacggacacgggtggcagcggcggcgcgtcggctgacaacacggcaaggaagacggtggacacgttcgggcagcgcacgtcgatttaccgtggcgtgacaaggcatagatggactgggagatatgaggcacatctttgggataacagttgcagaagggaagggcaaactcgtaagggtcgtcaagtctatttaggtggctatgataaagaggagaaagctgctagggcttatgatcttgctgctctgaagtactggggtgccacaacaacaacaaattttccagtgagtaactacgaaaaggagctcgaggacatgaagcacatgacaaggcaggagtttgtagcgtctctgagaaggaagagcagtggtttctccagaggtgcatccatttacaggggagtgactaggcatcaccaacatggaagatggcaagcacggattggacgagttgcagggaacaaggatctttacttgggcaccttcagcacccaggaggaggcagcggaggcgtacgacatcgcggcgatcaagttccgcggcctcaacgccgtcaccaacttcgacatgagccgctacgacgtgaagagcatcctggacagcagcgccctccccatcggcagcgccgccaagcgcctcaaggaggccgaggccgcagcgtccgcgcagcaccaccacgccggcgtggtgagctacgacgtcggccgcatcgcctcgcagctcggcgacggcggagccctggcggcggcgtacggcgcgcactaccacggcgccgcctggccgaccatcgcgttccagccgggcgccgccagcacaggcctgtaccacccgtacgcgcagcagccaatgcgcggcggcgggtggtgcaagcaggagcaggaccacgcggtgatcgcggccgcgcacagcctgcaggacctccaccacctgaacctgggcgcggccggcgcgcacgactttttctcggcagggcagcaggccgccgccgctgcgatgcacggcctgggtagcatcgacagtgcgtcgctcgagcacagcaccggctccaactccgtcgtctacaacggcggggtcggcgacagcaacggcgccagcgccgtcggcggcagtggcggtggctacatgatgccgatgagcgctgccggagcaaccactacatcggcaatggtgagccacgagcaggtgcatgcacgggcctacgacgaagccaagcaggctgctcagatggggtacgagagctacctggtgaacgcggagaacaatggtggcggaaggatgtctgcatgggggactgtcgtgtctgcagccgcggcggcagcagcaagcagcaacgacaacatggccgccgacgtcgggcatggcggcgcgcagctcttcagtgtctggaacgacacttaagcgtacgtgccggcctggctctccgaaagggcgtattccagcacactggcggccgttactagacccaacctagacttgtccatcttctggattggccaacttaattaatgtatgaaataaaaggatgcacacatagtgacatgctaatcactataatgtgggcatcaaagttgtgtgttatgtgtaattactagttatctgaataaaagagaaagagatcatccatatttcttatcctaaatgaatgtcacgtgtctttataattctttgatgaaccagatgcatttcattaaccaaatccatatacatataaatattaatcatatataattaatatcaattgggttagcaaaacaaatctagtctaggtgtgttttgcgaatgcggcctccgggcacccagctttcttgtacaaagtggccgttaacggatcggccagaatggcccggaccgggttaccccgcggttcaaagccaatgactgttgttaggtccagtttctaaggacgaatcatccaatcactggttctttctgaacaaaacaaagagctatagagttacgttactgtagccgagacagagcctgcaatctggttatgccacatactaggttctttcttaaagttgactcactctatcctaagttctacttacaaggagctacaacaaattggtcataaccggagagcgttcaaggaggtaatatcccatcttactctgtagcaaggctacaaaaggagagctaaagaactaggctacaaaaagagagctaaagaactaactatctagcaagactacagagctatagtgtagagatttcataaccggtgagcgttcaaggatactttgaagagaagaggtaatatctcaactagcaagactacaaaaaaatggagatataaaactaactgtctaacaagactacagagctatagtagagatagatacgttcgacacttaagcatgagaattcgagctcggtaccctggttcacaaactcaatacaacacacagtggagtagggtattacgctccggcggcccgaaccactctaaatccttgtgtcctcgtgtgctcttccaccattaatgactgtaattgcagggacacgaagagttgtagcgcttttgccaacaagatccgctatatgctagtagagtggaacctgcacagcaacaagcatccaataatctgagaataagaattatgtgtggtgatggttctcatctctgcaactcgccattttcgcgagagaaccaaatccaagttggtgaagatcatgatttgggctcatgggctggcatagtagctattacctttgcaattgtggttcgaatctatccgatattctccttttcagggagagctaatgcttatgcttattgggtattttggtttgacactgcttcacgcccaaaaaaaggcaactatgtctgagttggatatggcccaaaaaaaggcagctatgtctgagttggatatggaagtcttctttcgtttagggtgaagtaagaccaagctcatgagcttattatcttaggtcggaacaaattagttgataggcatggcacatttatcaaattataatgattttaacagaaaagcaacacctctttttcagcagcaccagctttgcaagctgcaattgacactccaagcatagtatttgctccaaactcagcctgcatttcgcacaatatcatatctatttccatttggataaaatatattttccagaaatatgggaacagaatcaagatacagaaaaaagttgtggtagtagtggtaagtggaaacacaagtacagtgaaaagatagcattatttctgaacagtcaaattaaccgaaataagtagtatcacatactgcccctaaattgactacacccaatgtaaagaattgcttgagcatattgagccatcagttgtttgtttgtgtaacggatttgacaatgcagagttcaggagcaaaaaaccgcaaaggagagaaagagggaaaggatctcctagtatcccaccttgtggcgcgccctgtcaagtgcatgatggcctggtcgatctgcgtctgctgctgcggttccatcccaacgagtgcctccgacaccttgtcgttgatcacccgcaccgcgtaggcgacccccctggcgaggaacttccgcctctcggaggccccggccgcgtcggcggcggcgccctcgagcgcgcccacgctagccgtagatgctcggtgcacggccttgttggtgtgcaactcgacctcaacggccggtgcgctacgcccgtcaaggatctggcgcgcccgcaccctcgtgatcacggtgggcgcctcccgcctcatgtggccgacgatgaaaagcgccgggttaggggccttggcgcgcaccgccgtattcagggcctcctcgctcttgcgcgagagcaggtgcttccccaggtactcctgcactgacaaggctgccacagcggtggaatttgtcctcacgacttcgccacgtcgtcctcacctccctggcttcccacgactccgccgtatcgaggtgctcggtgggtcgtcttaatccgaagtccgaactaggaagacgagacagagaggtctgaggaatgggcctcgtttgatgttgagctgaattatttttccagcataagcccaggtcttggtccatgaacaaaattactagaaacccagcccagtactacgatctaaaagagggactgccactggatagctctctctagcattctccacgctccaatacagcggcgtcgtgtctatccgggtctatccgcgaacacgtgagaactctccagaaactgctttctcctccacttcatctctctcgctttccctctataaaaagaccccttctaggaattgagggagacagcaagcaccaagcagcgatccgaagctcaatcaattcactcaaacctcttccccaaatcttcgattagatcttcgttgacaagaagactagaaccgaacctgacatgtccaacctgctcacggttcaccagaaccttccggctcttccagtggacgcgacgtccgatgaagtcaggaagaacctcatggacatgttccgcgacaggcaagcgttcagcgagcacacctggaagatgctgctctccgtctgccgctcctgggctgcatggtgcaagctgaacaacaggaagtggttccccgctgagcccgaggacgtgagggattaccttctgtacctgcaagcgcgaggtttgtttctgcttctacctttgatatatatataataattatcattaattagtagtaatataatatttcaaatatttttttcaaaataaaagaatgtagtatatagcaattgcttttctgtagtttataagtgtgtatattttaatttataacttttctaatatatgaccaaaacatggtgatgcctaggtctggcagtgaagaccatccagcaacaccttggacaactgaacatgcttcacaggcgctccggcctcccgcgccccagcgactcgaacgccgtgagcctcgtcatgcgccgcatcaggaaggaaaacgtcgatgccggcgaaagggcaaagcaggccctcgcgttcgagaggaccgatttcgaccaggtccgcagcctgatggagaacagcgacaggtgccaggacattaggaacctggcgttcctcggaattgcatacaacacgctcctcaggatcgcggaaattgcccgcattcgcgtgaaggacattagccgcaccgacggcggcaggatgcttatccacattggcaggaccaagacgctcgtttccaccgcaggcgtcgaaaaggccctcagcctcggagtgaccaagctcgtcgaacgctggatctccgtgtccggcgtcgcggacgacccaaacaactacctcttctgccgcgtccgcaagaacggggtggctgcccctagcgccaccagccaactcagcacgagggccttggaaggtattttcgaggccacccaccgcctgatctacggcgcgaaggatgacagcggtcaacgctacctcgcatggtccgggcactccgcccgcgttggagctgctagggacatggcccgcgccggtgtttccatccccgaaatcatgcaggcgggtggatggacgaacgtgaacattgtcatgaactacattcgcaaccttgacagcgagacgggcgcaatggttcgcctcctggaagatggtgactgaggtacccaacctagacttgtccatcttctggattggccaacttaattaatgtatgaaataaaaggatgcacacatagtgacatgctaatcactataatgtgggcatcaaagttgtgtgttatgtgtaattactagttatctgaataaaagagaaagagatcatccatatttcttatcctaaatgaatgtcacgtgtctttataattctttgatgaaccagatgcatttcattaaccaaatccatatacatataaatattaatcatatataattaatatcaattgggttagcaaaacaaatctagtctaggtgtgttttgcgatccgatatcgaattggccacggtaccagctgctgctgttctagggttcacaagtctgcctatttgtcttccccaatggagctatggttgtctggtctggtccttggtcgtgtcccgtttcattgtgtactatttacctgtaatgtgtatccttaagtctggtttgatggtgtctgaaacgttttgctgtggtagagcagcatggaagaactataatgaataagtgatccctaatcattgtgtccaaattttgcttctgctatacccttttgtgctgtttcttatgttttgcttaaaaatttgatctgacaaacaaatttgtctaaattatgctcttgttctgactgtgtactgtacacatttgtattgctaccggtttggcacatagttttctctttgattgcagatcaaacccttctgattgcagattgcttggctatggctgatgtgctcactgttcttctttagcttgtatattgctgatggtggcttggctacggctgaaaaagttgctgctgcgccgacttggcaactgttgctccagtaatgctttgtcctctcttcctagccgccgacttggcacttggcagctgttgctcctgtaatgcgttgttatctcttatctcttgagatgtactatgattttgaggctgtttgacttgtgccagattgccagtgctgatgctatattatctcaggtttttatgctagtatatgttttactgtgtgctgcctgtgtcgagttacgtaatctattgaaccgctatgcgtgttgatgccctgttgttgcttgccagattgatgcccctgttgcttgcagcttgcaagctgtagtgaaatcctaaaattccaaaccaaatctattctgaacttttgaagatctgtgatgtccggaagaaaagattcaaacagataaacgggactctccagaatctataaaataaatgatcgacaaacgctttgctttggtaggcttcaagcttggtcacccggtccgggcctagaaggccagcttcggccgccccgggcaactttattatacaaagttgatagataaatcagatatctggttcctaaggacccggcggaccgattaaactgattcggtccgacgcgttacctaataacttcgtatagcatacattatacgaagttattagctaactaactagtaagcttaagccatgggtcgacggatccgttaactagcgtggcatttggcaccgccgcacactatgcgagctaggagtgctagtttacagatgaaactatgaaaccaagaaaacacaattgtccgtagctagcgcgtggcgtcgtgtcaagcttcacacagtatcttcgttcttcactataaatcgcgcctgttgttcgtgagacccaccaccgtggataacagtcccctaataataagcgatcaacagcactgctgatggctgaacaccgaggcgccgccgcgcgtaaccatccgccggagcagcccgtcgtgccggcgaacgacgccttccccgaccgcgcccagcagctctgcctcgacgccgggcgcgcgctcgcgatgtgcggcgtgctcgtcgccgtccctcccgcattttacgcgtcgacgtcgcggacgacaccgcacttgccttcgtcggcttcgtcctctggatcatcggtgcgtggctgtgcctcctggcgctcacgcccttggctccacgggcggtgagggcgggcggggccgccgccagcaccttgctgatcaggtgcctgtccctttcatgaactactagcgcccgcgcccgcggccgccgggcacaagagaacacatcgatgttcgctgcgtacgtcagcaataaggcactctttgtcagtagtcgagtgcatatgttgggtgtttgccctgggagatttcaagtgttgtggccattatcccgcaggataaaaaatcggcggcttttggattgatacggaaaataacgatgtttcatgctcgtgttgtgtgtgtgacatcttgtcagccaagtttttaaccgttgctactccccctctgtgggctcagtgtgtggaccggaatacgtcgtacataggccgtagcctaagcccaatatgccgtttttcaggttggcctgtgtgacgacaagcgggtctcaaaagcccatcacgcaactggcctgcaattattggaggagagcgcgtcgagttggttccagaggctgcgtggtggggccggactctgcgacgacctctcgttcgcgtccgatttggttgccgtgagccgtgacgtaacgcctccttccgttcctccctatataagttccacccccgggtccggtttccccaagccccagtgacccccgatcccgatcgcgaaatctccgcacccgccggcaagggaccgaagcaagcctctctcccgaccgtcgcatcaaggtacgcgtccgctcgatctgtcctcttccttctcgatttgacttgctgtggtgcccgatcacgggatcagaatcgcaccagtgtagatttcgcatgttctaagatgtgttagtttccaggctaatccagttctcttgacgcccgatccgatcgagctccgtgtttatttcagcctaatcgtagtattcccctaaaatttcctcattagggggttcgcaagattgttggtcgacaggttcacttatgctcgatcgcttacttttagtcgattcatgctgcgtactattgttgccccccgtggttttatcttttctcgtgtgaaatccagtagatatagtagatatcgtagcattaggttttaattcaatcgattgattattgtatcatcaaaattgagaagttcgaatcatgcctatcatgctgcctcaaccgaaatcctgtatattgaagtttcaattcaattgattgatcattcattagattcaaccaaaatctagaaggttagatgacgcatgtcatgctgcctgcgtagtttacctttgatctgtttatgattaccttatcagtaggatatttgtgattttgggaagtagcactaactgattcatgctgacatgatgttccctttcagattatactgttgagtcctatctaattgatgctttgtatgctatatgaatacgtcatggtaaattagcagttaattagcatattagcaattgggcgtacctcatcaggattgctcttgtagatgtgtgtggtgatgtttcttgttcaattcatgttctgctttaaaagtatgtgttctctgtttgttaattaagattcatggttataatgatttggacctaattaatcagggttgcccttttagatgcgtggttacttgttgagttcatttttttcctgctatagttgtatgcgtttgttcattcatggttagatttgatttgtttcttctctattccatgccttccatatacttcaattgtagcttaacatgagatttctgtatatgcaggtcgaccgccggggatccacacgacaccatggcccagtccaagcacggcctgaccaaggagatgaccatgaagtaccgcatggagggctgcgtggacggccacaagttcgtgatcaccggcgagggcatcggctaccccttcaagggcaagcaggccatcaacctgtgcgtggtggagggcggccccttgcccttcgccgaggacatcttgtccgccgccttcatgtacggcaaccgcgtgttcaccgagtacccccaggacatcgtcgactacttcaagaactcctgccccgccggctacacctgggaccgctccttcctgttcgaggacggcgccgtgtgcatctgcaacgccgacatcaccgtgagcgtggaggagaactgcatgtaccacgagtccaagttctacggcgtgaacttccccgccgacggccccgtgatgaagaagatgaccgacaactgggagccctcctgcgagaagatcatccccgtgcccaagcagggcatcttgaagggcgacgtgagcatgtacctgctgctgaaggacggtggccgcttgcgctgccagttcgacaccgtgtacaaggccaagtccgtgccccgcaagatgcccgactggcacttcatccagcacaagctgacccgcgaggaccgcagcgacgccaagaaccagaagtggcacctgaccgagcacgccatcgcctccggctccgccttgccctccggactcagatctcgatagagtcaacctagacttgtccatcttctggattggccaacttaattaatgtatgaaataaaaggatgcacacatagtgacatgctaatcactataatgtgggcatcaaagttgtgtgttatgtgtaattactagttatctgaataaaagagaaagagatcatccatatttcttatcctaaatgaatgtcacgtgtctttataattctttgatgaaccagatgcatttcattaaccaaatccatatacatataaatattaatcatatataattaatatcaattgggttagcaaaacaaatctagtctaggtgtgttttgcgaattgcggcgcccttactttaacgcctctaaccaacacccctttatctttataaggaacaataaacagaatttgccccactgttctaaatcacctaataatatccccagctaaaaacaataaaggtttcctagaattaagacaagcatgactgttcctccaggagggtttggaacattgttgcagtcttgcagatacgggcgaagggtgagaaacagagcggagggctggaggtgacctcggtagtcgacgccggagttgagcttgacaacgacggggcggcccctgatggacttgaggaagtccgatggcgtcttcaccgtcccgccggcgcccgaggcgggcctgtcgctgccgccgccgccgctgctcatcttgcgcgctgtgcccccggcggtgtccctgtgttgcggatcgcgggtgggccaggtggatgcgagggcgacccgtttggactccggccggagccgccggatccctggtcggtgtcagtgccgtttactctgggccccacgtgtcagtaccgtctgtagatgacaacaacccgtcgtccacagtcatgtccaaaatatcctttcttcttttttttcgattcggatatctatcttccttttttttttccaaaaatcttcttgacgcaccagcgcgcacgtttgtggtaaacgccgacacgtcggtcccacgtcgatagaccccacccaccagtgagtagcgtgtacgtattcgggggtgacggacgtgtcgccgtcgtcttgctagtcccattcccatctgagccacacatctctgaacaaaaaaaaggagggaggcctccacgcacatccccctccgtgccacccgccccaaaccctcgcgccgcctccgagacagccgccgcaaccatggccaccgccgccgccgcgtctaccgcgctcactggcgccactaccgctgcgcccaaggcgaggcgccgggcgcacctcctggccacccgccgcgccctcgccgcgcccatcaggtgctcagcggcgtcacccgccatgccgatggctcccccggccaccccgctccggccgtggggccccaccgagccccgcaagggtgctgacatcctcgtcgagtccctcgagcgctgcggcgtccgcgacgtcttcgcctaccccggcggcgcgtccatggagatccaccaggcactcacccgctcccccgtcatcgccaaccacctcttccgccacgagcaaggggaggcctttgccgcctccggctacgcgcgctcctcgggccgcgtcggcgtctgcatcgccacctccggccccggcgccaccaacctagtctccgcgctcgccgacgcgctgctcgattccgtccccatggtcgccatcacgggacaggtggcgcgacgcatgattggcaccgacgccttccaggagacgcccatcgtcgaggtcacccgctccatcaccaagcacaactacctggtcctcgacgtcgacgacatcccccgcgtcgtgcaggaggctttcttcctcgcctcctctggtcgaccagggccggtgcttgtcgacatccccaaggacatccagcagcagatggcggtgcctgtctgggacaagcccatgagtctgcctgggtacattgcgcgccttcccaagccccctgcgactgagttgcttgagcaggtgctgcgtcttgttggtgaatcgcggcgccctgttctttatgtgggcggtggctgcgcagcatctggtgaggagttgcgacgctttgtggagctgactggaatcccggtcacaactactcttatgggcctcggcaacttccccagcgacgacccactgtctctgcgcatgctaggtatgcatgggacggtgtatgcaaattatgcagtggataaggccgatctgttgcttgcacttggtgtgcggtttgatgatcgcgtgacagggaagattgaggcttttgcaagcagggctaagattgtgcacgttgatattgatccggctgagattggcaagaacaagcagccacatgtgtccatctgtgcagatgttaagcttgctttgcagggcatgaatgctcttcttgaaggaagcacatcaaagaagagctttgactttggctcatggaacgatgagttggatcagcagaagagggaattcccccttgggtataaaacatctaatgaggagatccagccacaatatgctattcaggttcttgatgagctgacgaaaggcgaggccatcatcggcacaggtgttgggcagcaccagatgtgggcggcacagtactacacttacaagcggccaaggcagtggttgtcttcagctggtcttggggctatgggatttggtttgccggctgctgctggtgcttctgtggcaaacccaggtgtcactgttgttgacatcgatggagatggtagctttctcatgaacgttcaggagctagctatgatccgaattgagaacctcccagtgaaggtctttgtgctaaacaaccagcacctggggatggtggtgcagttggaggacaggttctataaggccaacagagcgcacacatacttgggaaacccagagaatgaaagtgagatatatccagatttcgtgacgatcgccaaagggttcaacattccagcggtccgtgtgacaaagaagaacgaagtccgcgcagcgataaagaagatgctcgagactccagggccgtacctcttggatataatcgtcccacaccaggagcatgtgttgcctatgatccctagtggtggggctttcaaggatatgatcctggatggtgatggcaggactgtgtactgactagctagtcagttaacagatctgccagatcctcggtgtacaaataacccgtcttatcctatgagacgggccggcgtcagtgtgttctggaggaatttttatgtcagagcctttttctttgtgtgcttgatgtagatgccaagggaagcttattggctgttgaagcttgatgcaaaataaattatggaactctgttttttgtttatctaataataactagcaaatatgcttccattgcattgaaactaacagccttttgtgtttccaagttttattttgtgacaatgtcatctatttcaattagttgtggaatcggaaacttgcaggactaacttggaaactccaatccctcagcatcctggactttttcctggtgtaatccatgtagatattattttaatcatcattttagttctggaggtttttccatctccggttttgctcccctttcttcaaaaaaaaaaaaaaaatgccgtaggcgccgcaacgcccacctgttgttcaaactcatgggcacgagtggctcgaagattttatacaacaattgctgtagtttcaccgttgctggtgaagaagcatttttttaaaaaaatatagtggtattcattttaattagtttagttgtgcagcgagcaaaatttggacatgctctgctcggaatctgatcgacctagacacagattagcagcagtagctttgtcatctgttccaagagttgcgatctgatagaagaaaaaaaaaccttcccttcaatgtaaaaccgaaactaacaagaaagaagcacagtgccgtttaggcaagtatggagtacgtattaagcatgtagaaggccatgcatgaaccactaacaagaaagaagcgcagtgccattcaggcaagcataagcatgtagattggcatgcatgaacaactaacagtagatcgtctctggtctgattagaagttttttgggaagccaagaaatcatgtacaactggttccatctcaaattccgtggcaaaaagaggcctaagcaacatacctcgagtagatcacattcaagcttggtcacccggtccgtcaatattctgattccgatgacttcgtaggttcctagctcaagccgctcgtgtccaagcgtcacttacgattagctaatgattacggcatctaggaccgactagtggcgcgccgactagctagctaaggtaccgagctcgaattcattccgattaatcgtggcctcttgctcttcaggatgaagagctatgtttaaacgtgcaagcgctactagacaattcagtacattaaaaacgtccgcaatgtgttattaagttgtctaagcgtcaatttgtttacaccacaatatatcctgcca

SEQ ID NO: 269 - DNA, 21008 bp, synthetic construct
  misc_feature 1..21008: note = PHP100011
  source 1..21008: mol_type = other DNA
gtttacccgccaatatatcctgtcaaacactgcggccgcacttgaccgcggatggagccggagctgtggtgaggccatcgacgggaggtgggggagaacacagtctcagtgttctttgtgagtccgcaaggtttttagcttttctgtattaattaaggttgctgttggctgtagaatacggtcgtggaagagctgtatcggtagctactacgtaagctattatatactggaagtctggagctcgtcgatctccggtcgtcttcctccatttctcctcgtcttgctttgactgctgctaccatttgcttctgttttctgatgaagcatgccatgtcggccaccagtgtttgtgtggtttttgcagggaatggctttcaagtgctgtgattgaatggccctcgtcgtcctcggctgagctcacatggacgcgtcatgtgagtgagatatatgatcatatgatgagtggggttcgggtgagtgcgtacttgaagtaggatcccgctttcactcattcattcattggcctttaaaccgggaaattttcgcgaggagatggagggaagcaagcagggtgacgagtgcagagtgccgcgagcgctttgtcaaaaggcaccgccgtaggcaaaaaaatcaatggccctgactgactcgatggtagtactactgtagagactagagagggttgctccccatatcttcgtgtgacttttactccagcattgcatttccgtcattgagacgttaattaatagcagctttcgggacagatgactgtggccatgtttcgtcacggccgcttcgtgccagctgggggtactatagtactgtgattttgttagtaaaaactttcattaggccaccattgacgaccgggccttcgcttttgctgcgctaattaaccatttcccggcgaccgaagggaacatgaacatgccccgacacatgagggcatgaggactagtgttctccctgtcgttcgttgacttgactagtgatagtttaaacgctcttcaactggaagagcggttactaccggttcactagctagctgctaatcgagctagttaccctatgaggtgacatgaagcgctcacggttactatgacggttagcttcacgactgttggtggcagtagcgtacgacttagctatagttccggacttacccttaagataacttcgtatagcatacattatacgaagttatgggcccacgcgtgaagagcggttaccagagctggtcacctttgtccaccaagatggaactgtcttcggccagaatggccatctggattcagcaggcctagaaggccatttatcgctatcaactttgtatagaaaagttgggccgaattcgagctcggtacggccagaatggcccggaccgaagcttgcggccgcacactgatagtttaaactgaaggcgggaaacgacaatctgatcatgagcggagaattaagggagtcacgttatgacccccgccgatgacgcgggacaagccgttttacgtttggaactgacagaaccgcaacgttgaaggagccactcagccgcgggtttctggagtttaatgagctaagcacatacgtcagaaaccattattgcgcgttcaaaagtcgcctaaggtcactatcagctagcaaatatttcttgtcaaaaatgctccactgacgttccataaattcccctcggtatccaattagagtctcatattcactctcccgggggatctcgactctagaggatcgctcaggaaggccgctgagatagaggcatggcggccaatgcgggcggcggtggagcgggaggaggcagcggcagcggcagcgtggctgcgccggcggtgtgccgccccagcggctcgcggtggacgccgacgccggagcagatcaggatgctgaaggagctctactacggctgcggcatccggtcgcccagctcggagcagatccagcgcatcaccgccatgctgcggcagcacggcaagatcgagggcaagaacgtcttctactggttccagaaccacaaggcccgcgagcgccagaagcgccgcctcaccagcctcgacgtcaacgtgcccgccgccggcgcggccgacgccaccaccagccaactcggcgtcctctcgctgtcgtcgccgccgccttcaggcgcggcgcctccctcgcccaccctcggcttctacgccgccggcaatggcggcggatcggctgtgctgctggacacgagttccgactggggcagcagcggcgctgccatggccaccgagacatgcttcctgcaggactacatgggcgtgacggacacgggcagctcgtcgcagtggccacgcttctcgtcgtcggacacgataatggcggcggccgcggcgcgggcggcgacgacgcgggcgcccgagacgctccctctcttcccgacctgcggcgacgacggcggcagcggtagcagcagctacttgccgttctggggtgccgcgtccacaactgccggcgccacttcttccgttgcgatccagcagcaacaccagctgcaggagcagtacagcttttacagcaacagcaacagcacccagctggccggcaccggcaaccaagacgtatcggcaacagcagcagcagccgccgccctggagctgagcctcagctcatggtgctccccttaccctgctgcagggagtatgtgagagcaacgcgagctgccactgctcttcactgatgtctctggaatggaaggaggaggaagtgagcatagcgttggtgcgttgctgtcaagggcgaattcacatggttaacctagacttgtccatcttctggattggccaacttaattaatgtatgaaataaaaggatgcacacatagtgacatgctaatcactataatgtgggcatcaaagttgtgtgttatgtgtaattactagttatctgaataaaagagaaagagatcatccatatttcttatcctaaatgaatgtcacgtgtctttataattctttgatgaaccagatgcatttcattaaccaaatccatatacatataaatattaatcatatataattaatatcaattgggttagcaaaacaaatctagtctaggtgtgttttgcgaatgcggccgccaccgcggtggagctcgaattccggtccgggcctagaaggccagcttcaagtttgtacaaaaaagcaggctccggccagaatggcccggaccgtcactgactagctaaacagcggccgcatcgagcagctggcttgtggggaccagacaaaaaaggaatggtgcagaattgttaggcgcacctaccaaaagcatctttgcctttattgcaaagataaagcagattcctctagtacaagtggggaacaaaataacgtggaaaagagctgtcctgacagcccactcactaatgcgtatgacgaacgcagtgacgaccacaaaactcgagcaacgagatcatgagccaatcaaagaggagtgatgtagacctaaagcaataatggagccatgacgtaagggcttacgcccatacgaaataattaaaggctgatgtgacctgtcggtctctcagaacctttactttttatgtttggcgtgtatttttaaatttccacggcaatgacgatgtgaccgtcgacccactaaaacattgctttgtcaaaagctaaaaaagatgatgcccgacagccacttgtgtgaagcatgagaagccggtccctccactaagaaaattagtgaagcatcttccagtggtccctccactcacagctcaatcagtgagcaacaggacgaaggaaatgacgtaagccatgacgtctaatcccagggcccggtgaccaatcgaattagcttggcgcgtggaccgaagcttgcatgcctgcaatttaaattataatcagtacgaactatctgacaactatccggtacctatccgagtagtatctgttatccgtttcttacccgcccgggttattacccggtcccgtcttgtatccattccgaatcttaactacccgtatccggcctcgtatccgagacacatgcattagagtagaatacatgatgactcggtatccggctgtatctgtcccgttttcatccctagttatcctaccaaatttgagaaaatgactcatgatgcattatctcattttagatggagtgatttctcaaacaaacacccccttagatagtcaaagtgactattcaagtttcctcttccgggttactctattgttcgtcaaaatgactattcaaaccaaacactctctaaatgtaacaagtgactggataggctatagccgagggtgttcgtctagtagagggtttgtttggaattcgttttttttgtatttccgtgttttcctgcgaaattaaattggttcatataaaattcctacatggcttctaagaagctattatattttgaatcggtcttagctccaaaggagcaaaccctatttctccacctagcattacctcgtcctagctcttgaaatgctcaagtagtcaagtgtttacatgtagtgcagtcaatgtcaaggtaacgcaataaactaaggccatgttcattccacctaggattatataattcagcttatagattatataatcaccaaataacctatttatggattattatagatatctaaattatataatccacataataatgcgtgttgtttattttcctcttaacttatttaagttggattatataatcttgagggtaaataaacatggcctaaatttactacaacatggatagtagttagagacatttgtttttaaaccatgaaaaaaccctataaacttctaaaaagttctgctaaaattctaaatacaaattaatatacaacttcaaaaaaatgttcaaaggtcatatctccagcacttctaaaaatcatttatttagaaaaataaaaaacatagaaaaattacaaatcattctaattgatgccgtaatgtgtttcaaaaactttctacaacaaaagcttaaacacaaccatcaaaaatgtatgagacattaatgtatttcacgctattgactattgcatatatttgtcgtgtaaagttttatagcccatttatacatcaattataatgattttaatttttctagatttcttttgtacaattttctatttttctatagctaaataattttaacaaaatttctagtgatatttctattttttttatttttgtacacctagatttgtagaaagttagagacattgtttatagtttaaaaattgaaaaaatatttactgtatttttactaacgggtgaagtcgcatccaaaaccacttcagtccatggcaagaggtattttactaacggacggacatggcccagacatccggaagaggcccaagggcccataacgtccgtacccgcatccgacggttccaagcctaacacgcgtcatccatcgggagctcgctctagggttttgcttcgagaccgttcccacttcccatcgctcatataacaccgggcgccgccgcttccgtcctcttcctctcgctccgttgctcgcctcgggtcaaaccctaagcaggtacgcttccttgtgcgacggccatctcctcttgcggacggctcgatttctcaatctgttgtctatttcactgtatctgacctttctttgttttatttttgttgttgtttcttccacagggagttgatttatccgctgcagccggatccatggccactgtgaacaactggctcgctttctccctctccccgcaggagctgccgccctcccagacgacggactccacactcatctcggccgccaccgccgaccatgtctccggcgatgtctgcttcaacatcccccaagattggagcatgaggggatcagagctttcggcgctcgtcgcggagccgaagctggaggacttcctcggcggcatctccttctccgagcagcatcacaaggccaactgcaacatgatacccagcactagcagcacagtttgctacgcgagctcaggtgctagcaccggctaccatcaccagctgtaccaccagcccaccagctcagcgctccacttcgcggactccgtaatggtggcttcctcggccggtgtccacgacggcggtgccatgctcagcgcggccgccgctaacggtgtcgctggcgctgccagtgccaacggcggcggcatcgggctgtccatgattaagaactggctgcggagccaaccggcgcccatgcagccgagggtggcggcggctgagggcgcgcaggggctctctttgtccatgaacatggcggggacgacccaaggcgctgctggcatgccacttctcgctggagagcgcgcacgggcgcccgagagtgtatcgacgtcagcacagggtggagccgtcgtcgtcacggcgccgaaggaggatagcggtggcagcggtgttgccggcgctctagtagccgtgagcacggacacgggtggcagcggcggcgcgtcggctgacaacacggcaaggaagacggtggacacgttcgggcagcgcacgtcgatttaccgtggcgtgacaaggcatagatggactgggagatatgaggcacatctttgggataacagttgcagaagggaagggcaaactcgtaagggtcgtcaagtctatttaggtggctatgataaagaggagaaagctgctagggcttatgatcttgctgctctgaagtactggggtgccacaacaacaacaaattttccagtgagtaactacgaaaaggagctcgaggacatgaagcacatgacaaggcaggagtttgtagcgtctctgagaaggaagagcagtggtttctccagaggtgcatccatttacaggggagtgactaggcatcaccaacatggaagatggcaagcacggattggacgagttgcagggaacaaggatctttacttgggcaccttcagcacccaggaggaggcagcggaggcgtacgacatcgcggcgatcaagttccgcggcctcaacgccgtcaccaacttcgacatgagccgctacgacgtgaagagcatcctggacagcagcgccctccccatcggcagcgccgccaagcgcctcaaggaggccgaggccgcagcgtccgcgcagcaccaccacgccggcgtggtgagctacgacgtcggccgcatcgcctcgcagctcggcgacggcggagccctggcggcggcgtacggcgcgcactaccacggcgccgcctggccgaccatcgcgttccagccgggcgccgccagcacaggcctgtaccacccgtacgcgcagcagccaatgcgcggcggcgggtggtgcaagcaggagcaggaccacgcggtgatcgcggccgcgcacagcctgcaggacctccaccacctgaacctgggcgcggccggcgcgcacgactttttctcggcagggcagcaggccgccgccgctgcgatgcacggcctgggtagcatcgacagtgcgtcgctcgagcacagcaccggctccaactccgtcgtctacaacggcggggtcggcgacagcaacggcgccagcgccgtcggcggcagtggcggtggctacatgatgccgatgagcgctgccggagcaaccactacatcggcaatggtgagccacgagcaggtgcatgcacgggcctacgacgaagccaagcaggctgctcagatggggtacgagagctacctggtgaacgcggagaacaatggtggcggaaggatgtctgcatgggggactgtcgtgtctgcagccgcggcggcagcagcaagcagcaacgacaacatggccgccgacgtcgggcatggcggcgcgcagctcttcagtgtctggaacgacacttaagcgtacgtgccggcctggctctccgaaagggcgtattccagcacactggcggccgttactagacccaacctagacttgtccatcttctggattggccaacttaattaatgtatgaaataaaaggatgcacacatagtgacatgctaatcactataatgtgggcatcaaagttgtgtgttatgtgtaattactagttatctgaataaaagagaaagagatcatccatatttcttatcctaaatgaatgtcacgtgtctttataattctttgatgaaccagatgcatttcattaaccaaatccatatacatataaatattaatcatatataattaatatcaattgggttagcaaaacaaatctagtctaggtgtgttttgcgaatgcggcctccgggcacccagctttcttgtacaaagtggccgttaacggatcggccagaatggcccggaccgggttaccccgcggttcaaagccaatgactgttgttaggtccagtttctaaggacgaatcatccaatcactggttctttctgaacaaaacaaagagctatagagttacgttactgtagccgagacagagcctgcaatctggttatgccacatactaggttctttcttaaagttgactcactctatcctaagttctacttacaaggagctacaacaaattggtcataaccggagagcgttcaaggaggtaatatcccatcttactctgtagcaaggctacaaaaggagagctaaagaactaggctacaaaaagagagctaaagaactaactatctagcaagactacagagctatagtgtagagatttcataaccggtgagcgttcaaggatactttgaagagaagaggtaatatctcaactagcaagactacaaaaaaatggagatataaaactaactgtctaacaagactacagagctatagtagagatagatacgttcgacacttaagcatgagaattcgagctcggtaccctggttcacaaactcaatacaacacacagtggagtagggtattacgctccggcggcccgaaccactctaaatccttgtgtcctcgtgtgctcttccaccattaatgactgtaattgcagggacacgaagagttgtagcgcttttgccaacaagatccgctatatgctagtagagtggaacctgcacagcaacaagcatccaataatctgagaataagaattatgtgtggtgatggttctcatctctgcaactcgccattttcgcgagagaaccaaatccaagttggtgaagatcatgatttgggctcatgggctggcatagtagctattacctttgcaattgtggttcgaatctatccgatattctccttttcagggagagctaatgcttatgcttattgggtattttggtttgacactgcttcacgcccaaaaaaaggcaactatgtctgagttggatatggcccaaaaaaaggcagctatgtctgagttggatatggaagtcttctttcgtttagggtgaagtaagaccaagctcatgagcttattatcttaggtcggaacaaattagttgataggcatggcacatttatcaaattataatgattttaacagaaaagcaacacctctttttcagcagcaccagctttgcaagctgcaattgacactccaagcatagtatttgctccaaactcagcctgcatttcgcacaatatcatatctatttccatttggataaaatatattttccagaaatatgggaacagaatcaagatacagaaaaaagttgtggtagtagtggtaagtggaaacacaagtacagtgaaaagatagcattatttctgaacagtcaaattaaccgaaataagtagtatcacatactgcccctaaattgactacacccaatgtaaagaattgcttgagcatattgagccatcagttgtttgtttgtgtaacggatttgacaatgcagagttcaggagcaaaaaaccgcaaaggagagaaagagggaaaggatctcctagtatcccaccttgtggcgcgccctgtcaagtgcatgatggcctggtcgatctgcgtctgctgctgcggttccatcccaacgagtgcctccgacaccttgtcgttgatcacccgcaccgcgtaggcgacccccctggcgaggaacttccgcctctcggaggccccggccgcgtcggcggcggcgccctcgagcgcgcccacgctagccgtagatgctcggtgcacggccttgttggtgtgcaactcgacctcaacggccggtgcgctacgcccgtcaaggatctggcgcgcccgcaccctcgtgatcacggtgggcgcctcccgcctcatgtggccgacgatgaaaagcgccgggttaggggccttggcgcgcaccgccgtattcagggcctcctcgctcttgcgcgagagcaggtgcttccccaggtactcctgcactgacaaggctgccacagcggtggaatttgtcctcacgacttcgccacgtcgtcctcacctccctggcttcccacgactccgccgtatcgaggtgctcggtgggtcgtcttaatccgaagtccgaactaggaagacgagacagagaggtctgaggaatgggcctcgtttgatgttgagctgaattatttttccagcataagcccaggtcttggtccatgaacaaaattactagaaacccagcccagtactacgatctaaaagagggactgccactggatagctctctctagcattctccacgctccaatacagcggcgtcgtgtctatccgggtctatccgcgaacacgtgagaactctccagaaactgctttctcctccacttcatctctctcgctttccctctataaaaagaccccttctaggaattgagggagacagcaagcaccaagcagcgatccgaagctcaatcaattcactcaaacctcttccccaaatcttcgattagatcttcgttgacaagaagactagaaccgaacctgacatgtccaacctgctcacggttcaccagaaccttccggctcttccagtggacgcgacgtccgatgaagtcaggaagaacctcatggacatgttccgcgacaggcaagcgttcagcgagcacacctggaagatgctgctctccgtctgccgctcctgggctgcatggtgcaagctgaacaacaggaagtggttccccgctgagcccgaggacgtgagggattaccttctgtacctgcaagcgcgaggtttgtttctgcttctacctttgatatatatataataattatcattaattagtagtaatataatatttcaaatatttttttcaaaataaaagaatgtagtatatagcaattgcttttctgtagtttataagtgtgtatattttaatttataacttttctaatatatgaccaaaacatggtgatgcctaggtctggcagtgaagaccatccagcaacaccttggacaactgaacatgcttcacaggcgctccggcctcccgcgccccagcgactcgaacgccgtgagcctcgtcatgcgccgcatcaggaaggaaaacgtcgatgccggcgaaagggcaaagcaggccctcgcgttcgagaggaccgatttcgaccaggtccgcagcctgatggagaacagcgacaggtgccaggacattaggaacctggcgttcctcggaattgcatacaacacgctcctcaggatcgcggaaattgcccgcattcgcgtgaaggacattagccgcaccgacggcggcaggatgcttatccacattggcaggaccaagacgctcgtttccaccgcaggcgtcgaaaaggccctcagcctcggagtgaccaagctcgtcgaacgctggatctccgtgtccggcgtcgcggacgacccaaacaactacctcttctgccgcgtccgcaagaacggggtggctgcccctagcgccaccagccaactcagcacgagggccttggaaggtattttcgaggccacccaccgcctgatctacggcgcgaaggatgacagcggtcaacgctacctcgcatggtccgggcactccgcccgcgttggagctgctagggacatggcccgcgccggtgtttccatccccgaaatcatgcaggcgggtggatggacgaacgtgaacattgtcatgaactacattcgcaaccttgacagcgagacgggcgcaatggttcgcctcctggaagatggtgactgaggtacccaacctagacttgtccatcttctggattggccaacttaattaatgtatgaaataaaaggatgcacacatagtgacatgctaatcactataatgtgggcatcaaagttgtgtgttatgtgtaattactagttatctgaataaaagagaaagagatcatccatatttcttatcctaaatgaatgtcacgtgtctttataattctttgatgaaccagatgcatttcattaaccaaatccatatacatataaatattaatcatatataattaatatcaattgggttagcaaaacaaatctagtctaggtgtgttttgcgatccgatatcgaattggccacggtaccagctgctgctgttctagggttcacaagtctgcctatttgtcttccccaatggagctatggttgtctggtctggtccttggtcgtgtcccgtttcattgtgtactatttacctgtaatgtgtatccttaagtctggtttgatggtgtctgaaacgttttgctgtggtagagcagcatggaagaactataatgaataagtgatccctaatcattgtgtccaaattttgcttctgctatacccttttgtgctgtttcttatgttttgcttaaaaatttgatctgacaaacaaatttgtctaaattatgctcttgttctgactgtgtactgtacacatttgtattgctaccggtttggcacatagttttctctttgattgcagatcaaacccttctgattgcagattgcttggctatggctgatgtgctcactgttcttctttagcttgtatattgctgatggtggcttggctacggctgaaaaagttgctgctgcgccgacttggcaactgttgctccagtaatgctttgtcctctcttcctagccgccgacttggcacttggcagctgttgctcctgtaatgcgttgttatctcttatctcttgagatgtactatgattttgaggctgtttgacttgtgccagattgccagtgctgatgctatattatctcaggtttttatgctagtatatgttttactgtgtgctgcctgtgtcgagttacgtaatctattgaaccgctatgcgtgttgatgccctgttgttgcttgccagattgatgcccctgttgcttgcagcttgcaagctgtagtgaaatcctaaaattccaaaccaaatctattctgaacttttgaagatctgtgatgtccggaagaaaagattcaaacagataaacgggactctccagaatctataaaataaatgatcgacaaacgctttgctttggtaggcttcaagcttggtcacccggtccgggcctagaaggccagcttcggccgccccgggcaactttattatacaaagttgatagataaatcagatatctggttcctaaggacccggcggaccgattaaactgattcggtccgacgcgttacctaataacttcgtatagcatacattatacgaagttattagctaactaactagtaagcttaagccatgggtcgacggatccgttaactagcgtggcatttggcaccgccgcacactatgcgagctaggagtgctagtttacagatgaaactatgaaaccaagaaaacacaattgtccgtagctagcgcgtggcgtcgtgtcaagcttcacacagtatcttcgttcttcactataaatcgcgcctgttgttcgtgagacccaccaccgtggataacagtcccctaataataagcgatcaacagcactgctgatggctgaacaccgaggcgccgccgcgcgtaaccatccgccggagcagcccgtcgtgccggcgaacgacgccttccccgaccgcgcccagcagctctgcctcgacgccgggcgcgcgctcgcgatgtgcggcgtgctcgtcgccgtccctcccgcattttacgcgtcgacgtcgcggacgacaccgcacttgccttcgtcggcttcgtcctctggatcatcggtgcgtggctgtgcctcctggcgctcacgcccttggctccacgggcggtgagggcgggcggggccgccgccagcaccttgctgatcaggtgcctgtccctttcatgaactactagcgcccgcgcccgcggccgccgggcacaagagaacacatcgatgttcgctgcgtacgtcagcaataaggcactctttgtcagtagtcgagtgcatatgttgggtgtttgccctgggagatttcaagtgttgtggccattatcccgcaggataaaaaatcggcggcttttggattgatacggaaaataacgatgtttcatgctcgtgttgtgtgtgtgacatcttgtcagccaagtttttaaccgttgctactccccctctgtgggctcagtgtgtggaccggaatacgtcgtacataggccgtagcctaagcccaatatgccgtttttcaggttggcctgtgtgacgacaagcgggtctcaaaagcccatcacgcaactggcctgcaattattggaggagagcgcgtcgagttggttccagaggctgcgtggtggggccggactctgcgacgacctctcgttcgcgtccgatttggttgccgtgagccgtgacgtaacgcctccttccgttcctccctatataagttccacccccgggtccggtttccccaagccccagtgacccccgatcccgatcgcgaaatctccgcacccgccggcaagggaccgaagcaagcctctctcccgaccgtcgcatcaaggtacgcgtccgctcgatctgtcctcttccttctcgatttgacttgctgtggtgcccgatcacgggatcagaatcgcaccagtgtagatttcgcatgttctaagatgtgttagtttccaggctaatccagttctcttgacgcccgatccgatcgagctccgtgtttatttcagcctaatcgtagtattcccctaaaatttcctcattagggggttcgcaagattgttggtcgacaggttcacttatgctcgatcgcttacttttagtcgattcatgctgcgtactattgttgccccccgtggttttatcttttctcgtgtgaaatccagtagatatagtagatatcgtagcattaggttttaattcaatcgattgattattgtatcatcaaaattgagaagttcgaatcatgcctatcatgctgcctcaaccgaaatcctgtatattgaagtttcaattcaattgattgatcattcattagattcaaccaaaatctagaaggttagatgacgcatgtcatgctgcctgcgtagtttacctttgatctgtttatgattaccttatcagtaggatatttgtgattttgggaagtagcactaactgattcatgctgacatgatgttccctttcagattatactgttgagtcctatctaattgatgctttgtatgctatatgaatacgtcatggtaaattagcagttaattagcatattagcaattgggcgtacctcatcaggattgctcttgtagatgtgtgtggtgatgtttcttgttcaattcatgttctgctttaaaagtatgtgttctctgtttgttaattaagattcatggttataatgatttggacctaattaatcagggttgcccttttagatgcgtggttacttgttgagttcatttttttcctgctatagttgtatgcgtttgttcattcatggttagatttgatttgtttcttctctattccatgccttccatatacttcaattgtagcttaacatgagatttctgtatatgcaggtcgaccgccggggatccacacgacaccatggcccagtccaagcacggcctgaccaaggagatgaccatgaagtaccgcatggagggctgcgtggacggccacaagttcgtgatcaccggcgagggcatcggctaccccttcaagggcaagcaggccatcaacctgtgcgtggtggagggcggccccttgcccttcgccgaggacatcttgtccgccgccttcatgtacggcaaccgcgtgttcaccgagtacccccaggacatcgtcgactacttcaagaactcctgccccgccggctacacctgggaccgctccttcctgttcgaggacggcgccgtgtgcatctgcaacgccgacatcaccgtgagcgtggaggagaactgcatgtaccacgagtccaagttctacggcgtgaacttccccgccgacggccccgtgatgaagaagatgaccgacaactgggagccctcctgcgagaagatcatccccgtgcccaagcagggcatcttgaagggcgacgtgagcatgtacctgctgctgaaggacggtggccgcttgcgctgccagttcgacaccgtgtacaaggccaagtccgtgccccgcaagatgcccgactggcacttcatccagcacaagctgacccgcgaggaccgcagcgacgccaagaaccagaagtggcacctgaccgagcacgccatcgcctccggctccgccttgccctccggactcagatctcgatagagtcaacctagacttgtccatcttctggattggccaacttaattaatgtatgaaataaaaggatgcacacatagtgacatgctaatcactataatgtgggcatcaaagttgtgtgttatgtgtaattactagttatctgaataaaagagaaagagatcatccatatttcttatcctaaatgaatgtcacgtgtctttataattctttgatgaaccagatgcatttcattaaccaaatccatatacatataaatattaatcatatataattaatatcaattgggttagcaaaacaaatctagtctaggtgtgttttgcgaattgcggcgcccttactttaacgcctctaaccaacacccctttatctttataaggaacaataaacagaatttgccccactgttctaaatcacctaataatatccccagctaaaaacaataaaggtttcctagaattaagacaagcatgactgttcctccaggagggtttggaacattgttgcagtcttgcagatacgggcgaagggtgagaaacagagcggagggctggaggtgacctcggtagtcgacgccggagttgagcttgacaacgacggggcggcccctgatggacttgaggaagtccgatggcgtcttcaccgtcccgccggcgcccgaggcgggcctgtcgctgccgccgccgccgctgctcatcttgcgcgctgtgcccccggcggtgtccctgtgttgcggatcgcgggtgggccaggtggatgcgagggcgacccgtttggactccggccggagccgccggatccctggtcggtgtcagtgccgtttactctgggccccacgtgtcagtaccgtctgtagatgacaacaacccgtcgtccacagtcatgtccaaaatatcctttcttcttttttttcgattcggatatctatcttccttttttttttccaaaaatcttcttgacgcaccagcgcgcacgtttgtggtaaacgccgacacgtcggtcccacgtcgatagaccccacccaccagtgagtagcgtgtacgtattcgggggtgacggacgtgtcgccgtcgtcttgctagtcccattcccatctgagccacacatctctgaacaaaaaaaaggagggaggcctccacgcacatccccctccgtgccacccgccccaaaccctcgcgccgcctccgagacagccgccgcaaccatggccaccgccgccgccgcgtctaccgcgctcactggcgccactaccgctgcgcccaaggcgaggcgccgggcgcacctcctggccacccgccgcgccctcgccgcgcccatcaggtgctcagcggcgtcacccgccatgccgatggctcccccggccaccccgctccggccgtggggccccaccgagccccgcaagggtgctgacatcctcgtcgagtccctcgagcgctgcggcgtccgcgacgtcttcgcctaccccggcggcgcgtccatggagatccaccaggcactcacccgctcccccgtcatcgccaaccacctcttccgccacgagcaaggggaggcctttgccgcctccggctacgcgcgctcctcgggccgcgtcggcgtctgcatcgccacctccggccccggcgccaccaacctagtctccgcgctcgccgacgcgctgctcgattccgtccccatggtcgccatcacgggacaggtggcgcgacgcatgattggcaccgacgccttccaggagacgcccatcgtcgaggtcacccgctccatcaccaagcacaactacctggtcctcgacgtcgacgacatcccccgcgtcgtgcaggaggctttcttcctcgcctcctctggtcgaccagggccggtgcttgtcgacatccccaaggacatccagcagcagatggcggtgcctgtctgggacaagcccatgagtctgcctgggtacattgcgcgccttcccaagccccctgcgactgagttgcttgagcaggtgctgcgtcttgttggtgaatcgcggcgccctgttctttatgtgggcggtggctgcgcagcatctggtgaggagttgcgacgctttgtggagctgactggaatcccggtcacaactactcttatgggcctcggcaacttccccagcgacgacccactgtctctgcgcatgctaggtatgcatgggacggtgtatgcaaattatgcagtggataaggccgatctgttgcttgcacttggtgtgcggtttgatgatcgcgtgacagggaagattgaggcttttgcaagcagggctaagattgtgcacgttgatattgatccggctgagattggcaagaacaagcagccacatgtgtccatctgtgcagatgttaagcttgctttgcagggcatgaatgctcttcttgaaggaagcacatcaaagaagagctttgactttggctcatggaacgatgagttggatcagcagaagagggaattcccccttgggtataaaacatctaatgaggagatccagccacaatatgctattcaggttcttgatgagctgacgaaaggcgaggccatcatcggcacaggtgttgggcagcaccagatgtgggcggcacagtactacacttacaagcggccaaggcagtggttgtcttcagctggtcttggggctatgggatttggtttgccggctgctgctggtgcttctgtggcaaacccaggtgtcactgttgttgacatcgatggagatggtagctttctcatgaacgttcaggagctagctatgatccgaattgagaacctcccagtgaaggtctttgtgctaaacaaccagcacctggggatggtggtgcagttggaggacaggttctataaggccaacagagcgcacacatacttgggaaacccagagaatgaaagtgagatatatccagatttcgtgacgatcgccaaagggttcaacattccagcggtccgtgtgacaaagaagaacgaagtccgcgcagcgataaagaagatgctcgagactccagggccgtacctcttggatataatcgtcccacaccaggagcatgtgttgcctatgatccctagtggtggggctttcaaggatatgatcctggatggtgatggcaggactgtgtactgactagctagtcagttaacagatctgccagatcctcggtgtacaaataacccgtcttatcctatgagacgggccggcgtcagtgtgttctggaggaatttttatgtcagagcctttttctttgtgtgcttgatgtagatgccaagggaagcttattggctgttgaagcttgatgcaaaataaattatggaactctgttttttgtttatctaataataactagcaaatatgcttccattgcattgaaactaacagccttttgtgtttccaagttttattttgtgacaatgtcatctatttcaattagttgtggaatcggaaacttgcaggactaacttggaaactccaatccctcagcatcctggactttttcctggtgtaatccatgtagatattattttaatcatcattttagttctggaggtttttccatctccggttttgctcccctttcttcaaaaaaaaaaaaaaaatgccgtaggcgccgcaacgcccacctgttgttcaaactcatgggcacgagtggctcgaagattttatacaacaattgctgtagtttcaccgttgctggtgaagaagcatttttttaaaaaaatatagtggtattcattttaattagtttagttgtgcagcgagcaaaatttggacatgctctgctcggaatctgatcgacctagacacagattagcagcagtagctttgtcatctgttccaagagttgcgatctgatagaagaaaaaaaaaccttcccttcaatgtaaaaccgaaactaacaagaaagaagcacagtgccgtttaggcaagtatggagtacgtattaagcatgtagaaggccatgcatgaaccactaacaagaaagaagcgcagtgccattcaggcaagcataagcatgtagattggcatgcatgaacaactaacagtagatcgtctctggtctgattagaagttttttgggaagccaagaaatcatgtacaactggttccatctcaaattccgtggcaaaaagaggcctaagcaacatacctcgagtagatcacattcaagcttggtcacccggtccgtcaatattctgattccgatgacttcgtaggttcctagctcaagccgctcgtgtccaagcgtcacttacgattagctaatgattacggcatctaggaccgactagtggcgcgccgactagctagctaaggtaccgagctcgaattcattccgattaatcgtggcctcttgctcttcaggatgaagagctatgtttaaacgtgcaagcgctactagacaattcagtacattaaaaacgtccgcaatgtgttattaagttgtctaagcgtcaatttgtttacaccacaatatatcctgcca

SEQ ID NO: 270 - DNA, 20917 bp, synthetic construct
  misc_feature 1..20917: note = PHP100012
  source 1..20917: mol_type = other DNA
gtttacccgccaatatatcctgtcaaacactgcggccgcacttgaccgcggatggagccggagctgtggtgaggccatcgacgggaggtgggggagaacacagtctcagtgttctttgtgagtccgcaaggtttttagcttttctgtattaattaaggttgctgttggctgtagaatacggtcgtggaagagctgtatcggtagctactacgtaagctattatatactggaagtctggagctcgtcgatctccggtcgtcttcctccatttctcctcgtcttgctttgactgctgctaccatttgcttctgttttctgatgaagcatgccatgtcggccaccagtgtttgtgtggtttttgcagggaatggctttcaagtgctgtgattgaatggccctcgtcgtcctcggctgagctcacatggacgcgtcatgtgagtgagatatatgatcatatgatgagtggggttcgggtgagtgcgtacttgaagtaggatcccgctttcactcattcattcattggcctttaaaccgggaaattttcgcgaggagatggagggaagcaagcagggtgacgagtgcagagtgccgcgagcgctttgtcaaaaggcaccgccgtaggcaaaaaaatcaatggccctgactgactcgatggtagtactactgtagagactagagagggttgctccccatatcttcgtgtgacttttactccagcattgcatttccgtcattgagacgttaattaatagcagctttcgggacagatgactgtggccatgtttcgtcacggccgcttcgtgccagctgggggtactatagtactgtgattttgttagtaaaaactttcattaggccaccattgacgaccgggccttcgcttttgctgcgctaattaaccatttcccggcgaccgaagggaacatgaacatgccccgacacatgagggcatgaggactagtgttctccctgtcgttcgttgacttgactagtgatagtttaaacgctcttcaactggaagagcggttactaccggttcactagctagctgctaatcgagctagttaccctatgaggtgacatgaagcgctcacggttactatgacggttagcttcacgactgttggtggcagtagcgtacgacttagctatagttccggacttacccttaagataacttcgtatagcatacattatacgaagttatgggcccacgcgtgaagagcggttaccagagctggtcacctttgtccaccaagatggaactgtcttcggccagaatggccatctggattcagcaggcctagaaggccatttatcgctatcaactttgtatagaaaagttgggccgaattcgagctcggtacggccagaatggcccggaccgaagcttgcggccgcacactgatagtttaaactgaaggcgggaaacgacaatctgatcatgagcggagaattaagggagtcacgttatgacccccgccgatgacgcgggacaagccgttttacgtttggaactgacagaaccgcaacgttgaaggagccactcagccgcgggtttctggagtttaatgagctaagcacatacgtcagaaaccattattgcgcgttcaaaagtcgcctaaggtcactatcagctagcaaatatttcttgtcaaaaatgctccactgacgttccataaattcccctcggtatccaattagagtctcatattcactctcccgggggatctcgactctagaggatcgctcaggaaggccgctgagatagaggcatggcggccaatgcgggcggcggtggagcgggaggaggcagcggcagcggcagcgtggctgcgccggcggtgtgccgccccagcggctcgcggtggacgccgacgccggagcagatcaggatgctgaaggagctctactacggctgcggcatccggtcgcccagctcggagcagatccagcgcatcaccgccatgctgcggcagcacggcaagatcgagggcaagaacgtcttctactggttccagaaccacaaggcccgcgagcgccagaagcgccgcctcaccagcctcgacgtcaacgtgcccgccgccggcgcggccgacgccaccaccagccaactcggcgtcctctcgctgtcgtcgccgccgccttcaggcgcggcgcctccctcgcccaccctcggcttctacgccgccggcaatggcggcggatcggctgtgctgctggacacgagttccgactggggcagcagcggcgctgccatggccaccgagacatgcttcctgcaggactacatgggcgtgacggacacgggcagctcgtcgcagtggccacgcttctcgtcgtcggacacgataatggcggcggccgcggcgcgggcggcgacgacgcgggcgcccgagacgctccctctcttcccgacctgcggcgacgacggcggcagcggtagcagcagctacttgccgttctggggtgccgcgtccacaactgccggcgccacttcttccgttgcgatccagcagcaacaccagctgcaggagcagtacagcttttacagcaacagcaacagcacccagctggccggcaccggcaaccaagacgtatcggcaacagcagcagcagccgccgccctggagctgagcctcagctcatggtgctccccttaccctgctgcagggagtatgtgagagcaacgcgagctgccactgctcttcactgatgtctctggaatggaaggaggaggaagtgagcatagcgttggtgcgttgctgtcaagggcgaattcacatggttaacctagacttgtccatcttctggattggccaacttaattaatgtatgaaataaaaggatgcacacatagtgacatgctaatcactataatgtgggcatcaaagttgtgtgttatgtgtaattactagttatctgaataaaagagaaagagatcatccatatttcttatcctaaatgaatgtcacgtgtctttataattctttgatgaaccagatgcatttcattaaccaaatccatatacatataaatattaatcatatataattaatatcaattgggttagcaaaacaaatctagtctaggtgtgttttgcgaatgcggccgccaccgcggtggagctcgaattccggtccgggcctagaaggccagcttcaagtttgtacaaaaaagcaggctccggccagaatggcccggaccgtcactgactagctaaacagcggccgcatcgagcagctggcttgtggggaccagacaaaaaaggaatggtgcagaattgttaggcgcacctaccaaaagcatctttgcctttattgcaaagataaagcagattcctctagtacaagtggggaacaaaataacgtggaaaagagctgtcctgacagcccactcactaatgcgtatgacgaacgcagtgacgaccacaaaactcgagcaacgagatcatgagccaatcaaagaggagtgatgtagacctaaagcaataatggagccatgacgtaagggcttacgcccatacgaaataattaaaggctgatgtgacctgtcggtctctcagaacctttactttttatgtttggcgtgtatttttaaatttccacggcaatgacgatgtgaccgtcgacccactaaaacattgctttgtcaaaagctaaaaaagatgatgcccgacagccacttgtgtgaagcatgagaagccggtccctccactaagaaaattagtgaagcatcttccagtggtccctccactcacagctcaatcagtgagcaacaggacgaaggaaatgacgtaagccatgacgtctaatcccagggcccggtgaccaatcgaattagcttggcgcgtggaccgaagcttgcatgcctgcaatttaaataatcacaaataatattcacaaaaatatatctctaaatagacttgctaccaaaatatatttcgtcacgaatgttagtagattttattttttccgaagtagcagaattcatcagtttgcatataaatgcatcaaggtttgagcactgacgagcattgtattgtgccccctggatctactaacaccaagacgcactaccgcagcagcgcaggagcagacgagggagccagcccagcaggcatgggcgtgcttcggagcacgcaaagccttgaggcggaggtggacgagctgcgcgccgcgctcctggcgggcgggtggcaccgctcggctggccacgcggacgccaagcgcgctccccagggcgatgccagaggggccgcagcgcgcgccgtgtgcgtcactcgcggcatctccttcgtcgggttcgccgtcgtcgaccgcctcctccggcacgggtacaccgtccgcctcgcgttggagacgcaaggtaccaacgtcccgtccgtcctcccccacactaacctacccggctacttctctcgctcgctctgaagctctcgcgcccctcggcccggcctgggacaattggtttgggacaagggtatccggccgcgcggacagaggcaataagtaccaacggaatgtacctgtaggtgcgccagtgctggactcgagagagacagagctgcatccaacgtcggtgcctcccgcggtgcctcgcgccaggctaccagtacttccgcgcccaacaccacgccccaagctggttgatgcacgcccaacgccggtagttctatgcccccgtgatacaccgccgccgcgtccaacgccatgccccaagccgtcacccacgtcaaggctgcagacgtctccttcctcctccatgccgacatggtctacgctcaaatcgaagatgagctcaagccgcaacaacaaatttcggtgctcccaagcttcataaaggctatcttcggcgtcgttgcgatccatggtggcacagaatcgagttgatgttgtagctggcggctagggtttgaagtggagaagaggtccggctggtggcatcctatcgtctattgagggttgggtccggtggcatcatacttgatgacaattgaaagtaattttaatcaacttgtcatgagtagtgagtcttttataaaaaataagctgaaataagcaccctttgatgagcttataggattatcataatctcaaatgctaaattatataattttattagataagttgcttgtttgtttccccactagcttatttacattggattatataatctacataaattataatctcaaacaaaaagtccttaatcagagatcagcgaggtctcacgagtgagaaggcgagagcttgtccaaacgagcattttcgggcgtgtgaacacccatttcagcaaagccgtcgttgtccagttcagcgaagcgcattctgcggctttggcgtgacccattctgctagctcagcactgagaatacgcgtccgctgcagcgttggcgtacaggccggactacattagccaacgcgtatcggcagtggcaaaccctcttcgcttctaactccgctgggccaccagctttgaccgccgcctcccttcccctccgctactgctcctccccaccccactcccccgcaggagcggcggcggcggcggcgaggtcgtaccccacatcggcgagcggcggcggcaccgccggaggcaaaggcaagggatccatggccactgtgaacaactggctcgctttctccctctccccgcaggagctgccgccctcccagacgacggactccacactcatctcggccgccaccgccgaccatgtctccggcgatgtctgcttcaacatcccccaagattggagcatgaggggatcagagctttcggcgctcgtcgcggagccgaagctggaggacttcctcggcggcatctccttctccgagcagcatcacaaggccaactgcaacatgatacccagcactagcagcacagtttgctacgcgagctcaggtgctagcaccggctaccatcaccagctgtaccaccagcccaccagctcagcgctccacttcgcggactccgtaatggtggcttcctcggccggtgtccacgacggcggtgccatgctcagcgcggccgccgctaacggtgtcgctggcgctgccagtgccaacggcggcggcatcgggctgtccatgattaagaactggctgcggagccaaccggcgcccatgcagccgagggtggcggcggctgagggcgcgcaggggctctctttgtccatgaacatggcggggacgacccaaggcgctgctggcatgccacttctcgctggagagcgcgcacgggcgcccgagagtgtatcgacgtcagcacagggtggagccgtcgtcgtcacggcgccgaaggaggatagcggtggcagcggtgttgccggcgctctagtagccgtgagcacggacacgggtggcagcggcggcgcgtcggctgacaacacggcaaggaagacggtggacacgttcgggcagcgcacgtcgatttaccgtggcgtgacaaggcatagatggactgggagatatgaggcacatctttgggataacagttgcagaagggaagggcaaactcgtaagggtcgtcaagtctatttaggtggctatgataaagaggagaaagctgctagggcttatgatcttgctgctctgaagtactggggtgccacaacaacaacaaattttccagtgagtaactacgaaaaggagctcgaggacatgaagcacatgacaaggcaggagtttgtagcgtctctgagaaggaagagcagtggtttctccagaggtgcatccatttacaggggagtgactaggcatcaccaacatggaagatggcaagcacggattggacgagttgcagggaacaaggatctttacttgggcaccttcagcacccaggaggaggcagcggaggcgtacgacatcgcggcgatcaagttccgcggcctcaacgccgtcaccaacttcgacatgagccgctacgacgtgaagagcatcctggacagcagcgccctccccatcggcagcgccgccaagcgcctcaaggaggccgaggccgcagcgtccgcgcagcaccaccacgccggcgtggtgagctacgacgtcggccgcatcgcctcgcagctcggcgacggcggagccctggcggcggcgtacggcgcgcactaccacggcgccgcctggccgaccatcgcgttccagccgggcgccgccagcacaggcctgtaccacccgtacgcgcagcagccaatgcgcggcggcgggtggtgcaagcaggagcaggaccacgcggtgatcgcggccgcgcacagcctgcaggacctccaccacctgaacctgggcgcggccggcgcgcacgactttttctcggcagggcagcaggccgccgccgctgcgatgcacggcctgggtagcatcgacagtgcgtcgctcgagcacagcaccggctccaactccgtcgtctacaacggcggggtcggcgacagcaacggcgccagcgccgtcggcggcagtggcggtggctacatgatgccgatgagcgctgccggagcaaccactacatcggcaatggtgagccacgagcaggtgcatgcacgggcctacgacgaagccaagcaggctgctcagatggggtacgagagctacctggtgaacgcggagaacaatggtggcggaaggatgtctgcatgggggactgtcgtgtctgcagccgcggcggcagcagcaagcagcaacgacaacatggccgccgacgtcgggcatggcggcgcgcagctcttcagtgtctggaacgacacttaagcgtacgtgccggcctggctctccgaaagggcgtattccagcacactggcggccgttactagacccaacctagacttgtccatcttctggattggccaacttaattaatgtatgaaataaaaggatgcacacatagtgacatgctaatcactataatgtgggcatcaaagttgtgtgttatgtgtaattactagttatctgaataaaagagaaagagatcatccatatttcttatcctaaatgaatgtcacgtgtctttataattctttgatgaaccagatgcatttcattaaccaaatccatatacatataaatattaatcatatataattaatatcaattgggttagcaaaacaaatctagtctaggtgtgttttgcgaatgcggcctccgggcacccagctttcttgtacaaagtggccgttaacggatcggccagaatggcccggaccgggttaccccgcggttcaaagccaatgactgttgttaggtccagtttctaaggacgaatcatccaatcactggttctttctgaacaaaacaaagagctatagagttacgttactgtagccgagacagagcctgcaatctggttatgccacatactaggttctttcttaaagttgactcactctatcctaagttctacttacaaggagctacaacaaattggtcataaccggagagcgttcaaggaggtaatatcccatcttactctgtagcaaggctacaaaaggagagctaaagaactaggctacaaaaagagagctaaagaactaactatctagcaagactacagagctatagtgtagagatttcataaccggtgagcgttcaaggatactttgaagagaagaggtaatatctcaactagcaagactacaaaaaaatggagatataaaactaactgtctaacaagactacagagctatagtagagatagatacgttcgacacttaagcatgagaattcgagctcggtaccctggttcacaaactcaatacaacacacagtggagtagggtattacgctccggcggcccgaaccactctaaatccttgtgtcctcgtgtgctcttccaccattaatgactgtaattgcagggacacgaagagttgtagcgcttttgccaacaagatccgctatatgctagtagagtggaacctgcacagcaacaagcatccaataatctgagaataagaattatgtgtggtgatggttctcatctctgcaactcgccattttcgcgagagaaccaaatccaagttggtgaagatcatgatttgggctcatgggctggcatagtagctattacctttgcaattgtggttcgaatctatccgatattctccttttcagggagagctaatgcttatgcttattgggtattttggtttgacactgcttcacgcccaaaaaaaggcaactatgtctgagttggatatggcccaaaaaaaggcagctatgtctgagttggatatggaagtcttctttcgtttagggtgaagtaagaccaagctcatgagcttattatcttaggtcggaacaaattagttgataggcatggcacatttatcaaattataatgattttaacagaaaagcaacacctctttttcagcagcaccagctttgcaagctgcaattgacactccaagcatagtatttgctccaaactcagcctgcatttcgcacaatatcatatctatttccatttggataaaatatattttccagaaatatgggaacagaatcaagatacagaaaaaagttgtggtagtagtggtaagtggaaacacaagtacagtgaaaagatagcattatttctgaacagtcaaattaaccgaaataagtagtatcacatactgcccctaaattgactacacccaatgtaaagaattgcttgagcatattgagccatcagttgtttgtttgtgtaacggatttgacaatgcagagttcaggagcaaaaaaccgcaaaggagagaaagagggaaaggatctcctagtatcccaccttgtggcgcgccctgtcaagtgcatgatggcctggtcgatctgcgtctgctgctgcggttccatcccaacgagtgcctccgacaccttgtcgttgatcacccgcaccgcgtaggcgacccccctggcgaggaacttccgcctctcggaggccccggccgcgtcggcggcggcgccctcgagcgcgcccacgctagccgtagatgctcggtgcacggccttgttggtgtgcaactcgacctcaacggccggtgcgctacgcccgtcaaggatctggcgcgcccgcaccctcgtgatcacggtgggcgcctcccgcctcatgtggccgacgatgaaaagcgccgggttaggggccttggcgcgcaccgccgtattcagggcctcctcgctcttgcgcgagagcaggtgcttccccaggtactcctgcactgacaaggctgccacagcggtggaatttgtcctcacgacttcgccacgtcgtcctcacctccctggcttcccacgactccgccgtatcgaggtgctcggtgggtcgtcttaatccgaagtccgaactaggaagacgagacagagaggtctgaggaatgggcctcgtttgatgttgagctgaattatttttccagcataagcccaggtcttggtccatgaacaaaattactagaaacccagcccagtactacgatctaaaagagggactgccactggatagctctctctagcattctccacgctccaatacagcggcgtcgtgtctatccgggtctatccgcgaacacgtgagaactctccagaaactgctttctcctccacttcatctctctcgctttccctctataaaaagaccccttctaggaattgagggagacagcaagcaccaagcagcgatccgaagctcaatcaattcactcaaacctcttccccaaatcttcgattagatcttcgttgacaagaagactagaaccgaacctgacatgtccaacctgctcacggttcaccagaaccttccggctcttccagtggacgcgacgtccgatgaagtcaggaagaacctcatggacatgttccgcgacaggcaagcgttcagcgagcacacctggaagatgctgctctccgtctgccgctcctgggctgcatggtgcaagctgaacaacaggaagtggttccccgctgagcccgaggacgtgagggattaccttctgtacctgcaagcgcgaggtttgtttctgcttctacctttgatatatatataataattatcattaattagtagtaatataatatttcaaatatttttttcaaaataaaagaatgtagtatatagcaattgcttttctgtagtttataagtgtgtatattttaatttataacttttctaatatatgaccaaaacatggtgatgcctaggtctggcagtgaagaccatccagcaacaccttggacaactgaacatgcttcacaggcgctccggcctcccgcgccccagcgactcgaacgccgtgagcctcgtcatgcgccgcatcaggaaggaaaacgtcgatgccggcgaaagggcaaagcaggccctcgcgttcgagaggaccgatttcgaccaggtccgcagcctgatggagaacagcgacaggtgccaggacattaggaacctggcgttcctcggaattgcatacaacacgctcctcaggatcgcggaaattgcccgcattcgcgtgaaggacattagccgcaccgacggcggcaggatgcttatccacattggcaggaccaagacgctcgtttccaccgcaggcgtcgaaaaggccctcagcctcggagtgaccaagctcgtcgaacgctggatctccgtgtccggcgtcgcggacgacccaaacaactacctcttctgccgcgtccgcaagaacggggtggctgcccctagcgccaccagccaactcagcacgagggccttggaaggtattttcgaggccacccaccgcctgatctacggcgcgaaggatgacagcggtcaacgctacctcgcatggtccgggcactccgcccgcgttggagctgctagggacatggcccgcgccggtgtttccatccccgaaatcatgcaggcgggtggatggacgaacgtgaacattgtcatgaactacattcgcaaccttgacagcgagacgggcgcaatggttcgcctcctggaagatggtgactgaggtacccaacctagacttgtccatcttctggattggccaacttaattaatgtatgaaataaaaggatgcacacatagtgacatgctaatcactataatgtgggcatcaaagttgtgtgttatgtgtaattactagttatctgaataaaagagaaagagatcatccatatttcttatcctaaatgaatgtcacgtgtctttataattctttgatgaaccagatgcatttcattaaccaaatccatatacatataaatattaatcatatataattaatatcaattgggttagcaaaacaaatctagtctaggtgtgttttgcgatccgatatcgaattggccacggtaccagctgctgctgttctagggttcacaagtctgcctatttgtcttccccaatggagctatggttgtctggtctggtccttggtcgtgtcccgtttcattgtgtactatttacctgtaatgtgtatccttaagtctggtttgatggtgtctgaaacgttttgctgtggtagagcagcatggaagaactataatgaataagtgatccctaatcattgtgtccaaattttgcttctgctatacccttttgtgctgtttcttatgttttgcttaaaaatttgatctgacaaacaaatttgtctaaattatgctcttgttctgactgtgtactgtacacatttgtattgctaccggtttggcacatagttttctctttgattgcagatcaaacccttctgattgcagattgcttggctatggctgatgtgctcactgttcttctttagcttgtatattgctgatggtggcttggctacggctgaaaaagttgctgctgcgccgacttggcaactgttgctccagtaatgctttgtcctctcttcctagccgccgacttggcacttggcagctgttgctcctgtaatgcgttgttatctcttatctcttgagatgtactatgattttgaggctgtttgacttgtgccagattgccagtgctgatgctatattatctcaggtttttatgctagtatatgttttactgtgtgctgcctgtgtcgagttacgtaatctattgaaccgctatgcgtgttgatgccctgttgttgcttgccagattgatgcccctgttgcttgcagcttgcaagctgtagtgaaatcctaaaattccaaaccaaatctattctgaacttttgaagatctgtgatgtccggaagaaaagattcaaacagataaacgggactctccagaatctataaaataaatgatcgacaaacgctttgctttggtaggcttcaagcttggtcacccggtccgggcctagaaggccagcttcggccgccccgggcaactttattatacaaagttgatagataaatcagatatctggttcctaaggacccggcggaccgattaaactgattcggtccgacgcgttacctaataacttcgtatagcatacattatacgaagttattagctaactaactagtaagcttaagccatgggtcgacggatccgttaactagcgtggcatttggcaccgccgcacactatgcgagctaggagtgctagtttacagatgaaactatgaaaccaagaaaacacaattgtccgtagctagcgcgtggcgtcgtgtcaagcttcacacagtatcttcgttcttcactataaatcgcgcctgttgttcgtgagacccaccaccgtggataacagtcccctaataataagcgatcaacagcactgctgatggctgaacaccgaggcgccgccgcgcgtaaccatccgccggagcagcccgtcgtgccggcgaacgacgccttccccgaccgcgcccagcagctctgcctcgacgccgggcgcgcgctcgcgatgtgcggcgtgctcgtcgccgtccctcccgcattttacgcgtcgacgtcgcggacgacaccgcacttgccttcgtcggcttcgtcctctggatcatcggtgcgtggctgtgcctcctggcgctcacgcccttggctccacgggcggtgagggcgggcggggccgccgccagcaccttgctgatcaggtgcctgtccctttcatgaactactagcgcccgcgcccgcggccgccgggcacaagagaacacatcgatgttcgctgcgtacgtcagcaataaggcactctttgtcagtagtcgagtgcatatgttgggtgtttgccctgggagatttcaagtgttgtggccattatcccgcaggataaaaaatcggcggcttttggattgatacggaaaataacgatgtttcatgctcgtgttgtgtgtgtgacatcttgtcagccaagtttttaaccgttgctactccccctctgtgggctcagtgtgtggaccggaatacgtcgtacataggccgtagcctaagcccaatatgccgtttttcaggttggcctgtgtgacgacaagcgggtctcaaaagcccatcacgcaactggcctgcaattattggaggagagcgcgtcgagttggttccagaggctgcgtggtggggccggactctgcgacgacctctcgttcgcgtccgatttggttgccgtgagccgtgacgtaacgcctccttccgttcctccctatataagttccacccccgggtccggtttccccaagccccagtgacccccgatcccgatcgcgaaatctccgcacccgccggcaagggaccgaagcaagcctctctcccgaccgtcgcatcaaggtacgcgtccgctcgatctgtcctcttccttctcgatttgacttgctgtggtgcccgatcacgggatcagaatcgcaccagtgtagatttcgcatgttctaagatgtgttagtttccaggctaatccagttctcttgacgcccgatccgatcgagctccgtgtttatttcagcctaatcgtagtattcccctaaaatttcctcattagggggttcgcaagattgttggtcgacaggttcacttatgctcgatcgcttacttttagtcgattcatgctgcgtactattgttgccccccgtggttttatcttttctcgtgtgaaatccagtagatatagtagatatcgtagcattaggttttaattcaatcgattgattattgtatcatcaaaattgagaagttcgaatcatgcctatcatgctgcctcaaccgaaatcctgtatattgaagtttcaattcaattgattgatcattcattagattcaaccaaaatctagaaggttagatgacgcatgtcatgctgcctgcgtagtttacctttgatctgtttatgattaccttatcagtaggatatttgtgattttgggaagtagcactaactgattcatgctgacatgatgttccctttcagattatactgttgagtcctatctaattgatgctttgtatgctatatgaatacgtcatggtaaattagcagttaattagcatattagcaattgggcgtacctcatcaggattgctcttgtagatgtgtgtggtgatgtttcttgttcaattcatgttctgctttaaaagtatgtgttctctgtttgttaattaagattcatggttataatgatttggacctaattaatcagggttgcccttttagatgcgtggttacttgttgagttcatttttttcctgctatagttgtatgcgtttgttcattcatggttagatttgatttgtttcttctctattccatgccttccatatacttcaattgtagcttaacatgagatttctgtatatgcaggtcgaccgccggggatccacacgacaccatggcccagtccaagcacggcctgaccaaggagatgaccatgaagtaccgcatggagggctgcgtggacggccacaagttcgtgatcaccggcgagggcatcggctaccccttcaagggcaagcaggccatcaacctgtgcgtggtggagggcggccccttgcccttcgccgaggacatcttgtccgccgccttcatgtacggcaaccgcgtgttcaccgagtacccccaggacatcgtcgactacttcaagaactcctgccccgccggctacacctgggaccgctccttcctgttcgaggacggcgccgtgtgcatctgcaacgccgacatcaccgtgagcgtggaggagaactgcatgtaccacgagtccaagttctacggcgtgaacttccccgccgacggccccgtgatgaagaagatgaccgacaactgggagccctcctgcgagaagatcatccccgtgcccaagcagggcatcttgaagggcgacgtgagcatgtacctgctgctgaaggacggtggccgcttgcgctgccagttcgacaccgtgtacaaggccaagtccgtgccccgcaagatgcccgactggcacttcatccagcacaagctgacccgcgaggaccgcagcgacgccaagaaccagaagtggcacctgaccgagcacgccatcgcctccggctccgccttgccctccggactcagatctcgatagagtcaacctagacttgtccatcttctggattggccaacttaattaatgtatgaaataaaaggatgcacacatagtgacatgctaatcactataatgtgggcatcaaagttgtgtgttatgtgtaattactagttatctgaataaaagagaaagagatcatccatatttcttatcctaaatgaatgtcacgtgtctttataattctttgatgaaccagatgcatttcattaaccaaatccatatacatataaatattaatcatatataattaatatcaattgggttagcaaaacaaatctagtctaggtgtgttttgcgaattgcggcgcccttactttaacgcctctaaccaacacccctttatctttataaggaacaataaacagaatttgccccactgttctaaatcacctaataatatccccagctaaaaacaataaaggtttcctagaattaagacaagcatgactgttcctccaggagggtttggaacattgttgcagtcttgcagatacgggcgaagggtgagaaacagagcggagggctggaggtgacctcggtagtcgacgccggagttgagcttgacaacgacggggcggcccctgatggacttgaggaagtccgatggcgtcttcaccgtcccgccggcgcccgaggcgggcctgtcgctgccgccgccgccgctgctcatcttgcgcgctgtgcccccggcggtgtccctgtgttgcggatcgcgggtgggccaggtggatgcgagggcgacccgtttggactccggccggagccgccggatccctggtcggtgtcagtgccgtttactctgggccccacgtgtcagtaccgtctgtagatgacaacaacccgtcgtccacagtcatgtccaaaatatcctttcttcttttttttcgattcggatatctatcttccttttttttttccaaaaatcttcttgacgcaccagcgcgcacgtttgtggtaaacgccgacacgtcggtcccacgtcgatagaccccacccaccagtgagtagcgtgtacgtattcgggggtgacggacgtgtcgccgtcgtcttgctagtcccattcccatctgagccacacatctctgaacaaaaaaaaggagggaggcctccacgcacatccccctccgtgccacccgccccaaaccctcgcgccgcctccgagacagccgccgcaaccatggccaccgccgccgccgcgtctaccgcgctcactggcgccactaccgctgcgcccaaggcgaggcgccgggcgcacctcctggccacccgccgcgccctcgccgcgcccatcaggtgctcagcggcgtcacccgccatgccgatggctcccccggccaccccgctccggccgtggggccccaccgagccccgcaagggtgctgacatcctcgtcgagtccctcgagcgctgcggcgtccgcgacgtcttcgcctaccccggcggcgcgtccatggagatccaccaggcactcacccgctcccccgtcatcgccaaccacctcttccgccacgagcaaggggaggcctttgccgcctccggctacgcgcgctcctcgggccgcgtcggcgtctgcatcgccacctccggccccggcgccaccaacctagtctccgcgctcgccgacgcgctgctcgattccgtccccatggtcgccatcacgggacaggtggcgcgacgcatgattggcaccgacgccttccaggagacgcccatcgtcgaggtcacccgctccatcaccaagcacaactacctggtcctcgacgtcgacgacatcccccgcgtcgtgcaggaggctttcttcctcgcctcctctggtcgaccagggccggtgcttgtcgacatccccaaggacatccagcagcagatggcggtgcctgtctgggacaagcccatgagtctgcctgggtacattgcgcgccttcccaagccccctgcgactgagttgcttgagcaggtgctgcgtcttgttggtgaatcgcggcgccctgttctttatgtgggcggtggctgcgcagcatctggtgaggagttgcgacgctttgtggagctgactggaatcccggtcacaactactcttatgggcctcggcaacttccccagcgacgacccactgtctctgcgcatgctaggtatgcatgggacggtgtatgcaaattatgcagtggataaggccgatctgttgcttgcacttggtgtgcggtttgatgatcgcgtgacagggaagattgaggcttttgcaagcagggctaagattgtgcacgttgatattgatccggctgagattggcaagaacaagcagccacatgtgtccatctgtgcagatgttaagcttgctttgcagggcatgaatgctcttcttgaaggaagcacatcaaagaagagctttgactttggctcatggaacgatgagttggatcagcagaagagggaattcccccttgggtataaaacatctaatgaggagatccagccacaatatgctattcaggttcttgatgagctgacgaaaggcgaggccatcatcggcacaggtgttgggcagcaccagatgtgggcggcacagtactacacttacaagcggccaaggcagtggttgtcttcagctggtcttggggctatgggatttggtttgccggctgctgctggtgcttctgtggcaaacccaggtgtcactgttgttgacatcgatggagatggtagctttctcatgaacgttcaggagctagctatgatccgaattgagaacctcccagtgaaggtctttgtgctaaacaaccagcacctggggatggtggtgcagttggaggacaggttctataaggccaacagagcgcacacatacttgggaaacccagagaatgaaagtgagatatatccagatttcgtgacgatcgccaaagggttcaacattccagcggtccgtgtgacaaagaagaacgaagtccgcgcagcgataaagaagatgctcgagactccagggccgtacctcttggatataatcgtcccacaccaggagcatgtgttgcctatgatccctagtggtggggctttcaaggatatgatcctggatggtgatggcaggactgtgtactgactagctagtcagttaacagatctgccagatcctcggtgtacaaataacccgtcttatcctatgagacgggccggcgtcagtgtgttctggaggaatttttatgtcagagcctttttctttgtgtgcttgatgtagatgccaagggaagcttattggctgttgaagcttgatgcaaaataaattatggaactctgttttttgtttatctaataataactagcaaatatgcttccattgcattgaaactaacagccttttgtgtttccaagttttattttgtgacaatgtcatctatttcaattagttgtggaatcggaaacttgcaggactaacttggaaactccaatccctcagcatcctggactttttcctggtgtaatccatgtagatattattttaatcatcattttagttctggaggtttttccatctccggttttgctcccctttcttcaaaaaaaaaaaaaaaatgccgtaggcgccgcaacgcccacctgttgttcaaactcatgggcacgagtggctcgaagattttatacaacaattgctgtagtttcaccgttgctggtgaagaagcatttttttaaaaaaatatagtggtattcattttaattagtttagttgtgcagcgagcaaaatttggacatgctctgctcggaatctgatcgacctagacacagattagcagcagtagctttgtcatctgttccaagagttgcgatctgatagaagaaaaaaaaaccttcccttcaatgtaaaaccgaaactaacaagaaagaagcacagtgccgtttaggcaagtatggagtacgtattaagcatgtagaaggccatgcatgaaccactaacaagaaagaagcgcagtgccattcaggcaagcataagcatgtagattggcatgcatgaacaactaacagtagatcgtctctggtctgattagaagttttttgggaagccaagaaatcatgtacaactggttccatctcaaattccgtggcaaaaagaggcctaagcaacatacctcgagtagatcacattcaagcttggtcacccggtccgtcaatattctgattccgatgacttcgtaggttcctagctcaagccgctcgtgtccaagcgtcacttacgattagctaatgattacggcatctaggaccgactagtggcgcgccgactagctagctaaggtaccgagctcgaattcattccgattaatcgtggcctcttgctcttcaggatgaagagctatgtttaaacgtgcaagcgctactagacaattcagtacattaaaaacgtccgcaatgtgttattaagttgtctaagcgtcaatttgtttacaccacaatatatcctgcca

SEQ ID NO: 271 - DNA, 22394 bp, synthetic construct
  misc_feature 1..22394: note = PHP100013
  source 1..22394: mol_type = other DNA
gtttacccgccaatatatcctgtcaaacactgcggccgcacttgaccgcggatggagccggagctgtggtgaggccatcgacgggaggtgggggagaacacagtctcagtgttctttgtgagtccgcaaggtttttagcttttctgtattaattaaggttgctgttggctgtagaatacggtcgtggaagagctgtatcggtagctactacgtaagctattatatactggaagtctggagctcgtcgatctccggtcgtcttcctccatttctcctcgtcttgctttgactgctgctaccatttgcttctgttttctgatgaagcatgccatgtcggccaccagtgtttgtgtggtttttgcagggaatggctttcaagtgctgtgattgaatggccctcgtcgtcctcggctgagctcacatggacgcgtcatgtgagtgagatatatgatcatatgatgagtggggttcgggtgagtgcgtacttgaagtaggatcccgctttcactcattcattcattggcctttaaaccgggaaattttcgcgaggagatggagggaagcaagcagggtgacgagtgcagagtgccgcgagcgctttgtcaaaaggcaccgccgtaggcaaaaaaatcaatggccctgactgactcgatggtagtactactgtagagactagagagggttgctccccatatcttcgtgtgacttttactccagcattgcatttccgtcattgagacgttaattaatagcagctttcgggacagatgactgtggccatgtttcgtcacggccgcttcgtgccagctgggggtactatagtactgtgattttgttagtaaaaactttcattaggccaccattgacgaccgggccttcgcttttgctgcgctaattaaccatttcccggcgaccgaagggaacatgaacatgccccgacacatgagggcatgaggactagtgttctccctgtcgttcgttgacttgactagtgatagtttaaacgctcttcaactggaagagcggttactaccggttcactagctagctgctaatcgagctagttaccctatgaggtgacatgaagcgctcacggttactatgacggttagcttcacgactgttggtggcagtagcgtacgacttagctatagttccggacttacccttaagataacttcgtatagcatacattatacgaagttatgggcccacgcgtgaagagcggttaccagagctggtcacctttgtccaccaagatggaactgtcttcggccagaatggccatctggattcagcaggcctagaaggccatttatcgctatcaactttgtatagaaaagttgggccgaattcgagctcggtacggccagaatggcccggaccgaagcttgcggccgcacactgatagtttaaactgaaggcgggaaacgacaatctgatcatgagcggagaattaagggagtcacgttatgacccccgccgatgacgcgggacaagccgttttacgtttggaactgacagaaccgcaacgttgaaggagccactcagccgcgggtttctggagtttaatgagctaagcacatacgtcagaaaccattattgcgcgttcaaaagtcgcctaaggtcactatcagctagcaaatatttcttgtcaaaaatgctccactgacgttccataaattcccctcggtatccaattagagtctcatattcactctcccgggggatctcgactctagaggatcgctcaggaaggccgctgagatagaggcatggcggccaatgcgggcggcggtggagcgggaggaggcagcggcagcggcagcgtggctgcgccggcggtgtgccgccccagcggctcgcggtggacgccgacgccggagcagatcaggatgctgaaggagctctactacggctgcggcatccggtcgcccagctcggagcagatccagcgcatcaccgccatgctgcggcagcacggcaagatcgagggcaagaacgtcttctactggttccagaaccacaaggcccgcgagcgccagaagcgccgcctcaccagcctcgacgtcaacgtgcccgccgccggcgcggccgacgccaccaccagccaactcggcgtcctctcgctgtcgtcgccgccgccttcaggcgcggcgcctccctcgcccaccctcggcttctacgccgccggcaatggcggcggatcggctgtgctgctggacacgagttccgactggggcagcagcggcgctgccatggccaccgagacatgcttcctgcaggactacatgggcgtgacggacacgggcagctcgtcgcagtggccacgcttctcgtcgtcggacacgataatggcggcggccgcggcgcgggcggcgacgacgcgggcgcccgagacgctccctctcttcccgacctgcggcgacgacggcggcagcggtagcagcagctacttgccgttctggggtgccgcgtccacaactgccggcgccacttcttccgttgcgatccagcagcaacaccagctgcaggagcagtacagcttttacagcaacagcaacagcacccagctggccggcaccggcaaccaagacgtatcggcaacagcagcagcagccgccgccctggagctgagcctcagctcatggtgctccccttaccctgctgcagggagtatgtgagagcaacgcgagctgccactgctcttcactgatgtctctggaatggaaggaggaggaagtgagcatagcgttggtgcgttgctgtcaagggcgaattcacatggttaacctagacttgtccatcttctggattggccaacttaattaatgtatgaaataaaaggatgcacacatagtgacatgctaatcactataatgtgggcatcaaagttgtgtgttatgtgtaattactagttatctgaataaaagagaaagagatcatccatatttcttatcctaaatgaatgtcacgtgtctttataattctttgatgaaccagatgcatttcattaaccaaatccatatacatataaatattaatcatatataattaatatcaattgggttagcaaaacaaatctagtctaggtgtgttttgcgaatgcggccgccaccgcggtggagctcgaattccggtccgggcctagaaggccagcttcaagtttgtacaaaaaagcaggctccggccagaatggcccggaccgtcactgactagctaaacagcggccgcatcgagcagctggcttgtggggaccagacaaaaaaggaatggtgcagaattgttaggcgcacctaccaaaagcatctttgcctttattgcaaagataaagcagattcctctagtacaagtggggaacaaaataacgtggaaaagagctgtcctgacagcccactcactaatgcgtatgacgaacgcagtgacgaccacaaaactcgagcaacgagatcatgagccaatcaaagaggagtgatgtagacctaaagcaataatggagccatgacgtaagggcttacgcccatacgaaataattaaaggctgatgtgacctgtcggtctctcagaacctttactttttatgtttggcgtgtatttttaaatttccacggcaatgacgatgtgaccgtcgacccactaaaacattgctttgtcaaaagctaaaaaagatgatgcccgacagccacttgtgtgaagcatgagaagccggtccctccactaagaaaattagtgaagcatcttccagtggtccctccactcacagctcaatcagtgagcaacaggacgaaggaaatgacgtaagccatgacgtctaatcccagggcccggtgaccaatcgaattagcttggcgcgtggaccgaagcttgcatgcctgcaggtaccgtccatgggtatccgaaacctgaatacctgattagaagacgggtatgggatggttcctttaccaattaatgggaaagaacgtctactcgtttggtagacgggtataggtggatactaccccatacccgtctacccgtaaaaaatatgctcgcaacataccaatattatcatctaataaagcccatcttaactagaaggaaccccttgttcgaatattatttgtttaattatcaagttatgtagtcatgtggtttgttatatttgaagttcaacttatttttatatgtttgtttgtcattctgagtgattggcatattacaatttaagatttttctagcggtacgggctacccgatggataaaattacctacgcggggtatgtgtacgagtaagattgtatattgtgagtgtatatgggcaactcgacgaacatatttttttggtggatacaagtatggaatgctattacctgtcaggtttatattcattgccatctctatccccatatggtgattgtcctcctacattcgtgacaattccccaaggagcaacaggcgacattgatgtcacttcgaacaaatctgcttactttaatgcttcataattttaacaacaaagaggatggaggaagacaacagataaaatatcgataaatacacatatttaaaaaaaatccacactattttaggctcacaatagtttttaaagtccatatttcttagatccatgaatggctactacactcaattaactctattgatggcaacaataaaaagagatcaaaattatgggtaaatagccaacacatataactccaccgcataagcgcgtcaccacaatacccaaaacaactaaagaaccgatggtcgatgagcgatcataagatcaacctctttaacaacatctacaaccgtttgtgcacagcctgattgagtgacccaatgaggctatgctgctttaagcggttaaggaaaatttccacaacaagcatagaaaaaacaagttggagcacacgtgacacgttatgccattagctcaagtggtgcgtaaaacacgatgataatgactcgagtgatgagagaaaaagatatgttcttaacttggacgacaatcaaagctcaatgacatatgaaagtatggacacactatgctctattgtcaccatagggcaagagttcagtagaaggcaaattgttcgacaacaagctatgttggtcttttgattctgacgagtcaatgatagcttttcaatgatactattaactttctaaaattaggaagcaacaaaaaatctacaaaaaacatactttttaacttttggtaaaagctaaacttttttgagttttttcccgaaagcacgcctagtcagccaccagctggcacgcgagtctcccaacaataggagggaccacctgtcatgctgtgggaccacgaagaaaaccctccagagacgacgatagacctccgtccatagacgcggtctaccgtggtccggacgctcccggccgcgaattcaggtcgtggcgggccctgccgacccaactactggtccagaggcctccacgcgagccgtgggccgtggtctaggagccgggtccgcctatctacttgacggtcacggaaacccggacccggtaggaaggagctataaagacaagccaaacgagggcatcccttcttcagccgcacgcttcttgttgccaaagaattccctcccctagccgccgccgccgccgctcgtctccctgagaggtgccgggaccgaggaactggccgagtactaggtagagaatcggtttttcttgtctcagcccggggtctgctgcgtctggtggtggtgaaggggagaaattcgtgagatctgttccggatcaggcgtgcgagctcgggaatcaggggtttcacacatagcttcgtcgatttgtaagttttttctagccgattcctctctttttgtacgttttttgttattagattcgagatttgttggatgtgttggtttatgttgctgcctttctagatttctcggtgtgaatgtatgagggttcgatccttaggcatgaaaacatagctacatggagttagctcgttttcttaagtcacgtggtggtcggcgttatacctgttgcttgatgcgttatccgtgctatcgctgttcagatttagataggtggatcggtcatttgttcgttgtacgtattttgttacttcaaaattgatgctaaccctgttaattgaaaattgatggcagtggatacgctccacctttgtttagatttggaaacatggttaggaaatatgtgttcatattaggaaacgtggataggaaatatggctcattaccctggtactcggaaaagtaaggaaaaactattaacctttttgtttaggttttgattcgtggacaagatctataaattcactgaaaagacgcatacgatttcttgtacaggtgatatcatgccatgtggaaagtaaatgaaatcatacaaggctgatttttgcttttgttcccatcagatctgtgatttagttttgttttcccaaacaggttatgtttggtcatgtactcatgtgaatgatatagatctgttgctctaattagttagaaacatttattttgggcatatatctttaatggcataactgtggtacgttgtgatggtttattttagctgtcgtgcctggatcatcaacatcttgttttatcttttatgagaagaatttttgttcgatttgatggatgtgttcaatattttggtcttccatgcaggaatttgatgtactaatggagtctaagggtggcaaaaagtctagcagtagtcgttctatgatgtatgaagctccccttggctacagcattgaggacgttcgacctgccggaggcgtgaagaagttccagtctgctgcttactccaacgtaaaaaatcaatcatcacaatgatgctcttcattctacctcttgtattttattagatatatgttgatagtaacatctattttttcttgttgcagtgcgcgaagaagccatcctgatatcccttttggcttcctcattctagtagtttaggatttcttttctgacactttgattctgaccaatctctctggcctgctgcttcctgataatcgaccagttccccagtcttgctccttgcactcctccctccatctccagcattgtgttctgattcacctgctccaggatccatggccactgtgaacaactggctcgctttctccctctccccgcaggagctgccgccctcccagacgacggactccacactcatctcggccgccaccgccgaccatgtctccggcgatgtctgcttcaacatcccccaagattggagcatgaggggatcagagctttcggcgctcgtcgcggagccgaagctggaggacttcctcggcggcatctccttctccgagcagcatcacaaggccaactgcaacatgatacccagcactagcagcacagtttgctacgcgagctcaggtgctagcaccggctaccatcaccagctgtaccaccagcccaccagctcagcgctccacttcgcggactccgtaatggtggcttcctcggccggtgtccacgacggcggtgccatgctcagcgcggccgccgctaacggtgtcgctggcgctgccagtgccaacggcggcggcatcgggctgtccatgattaagaactggctgcggagccaaccggcgcccatgcagccgagggtggcggcggctgagggcgcgcaggggctctctttgtccatgaacatggcggggacgacccaaggcgctgctggcatgccacttctcgctggagagcgcgcacgggcgcccgagagtgtatcgacgtcagcacagggtggagccgtcgtcgtcacggcgccgaaggaggatagcggtggcagcggtgttgccggcgctctagtagccgtgagcacggacacgggtggcagcggcggcgcgtcggctgacaacacggcaaggaagacggtggacacgttcgggcagcgcacgtcgatttaccgtggcgtgacaaggcatagatggactgggagatatgaggcacatctttgggataacagttgcagaagggaagggcaaactcgtaagggtcgtcaagtctatttaggtggctatgataaagaggagaaagctgctagggcttatgatcttgctgctctgaagtactggggtgccacaacaacaacaaattttccagtgagtaactacgaaaaggagctcgaggacatgaagcacatgacaaggcaggagtttgtagcgtctctgagaaggaagagcagtggtttctccagaggtgcatccatttacaggggagtgactaggcatcaccaacatggaagatggcaagcacggattggacgagttgcagggaacaaggatctttacttgggcaccttcagcacccaggaggaggcagcggaggcgtacgacatcgcggcgatcaagttccgcggcctcaacgccgtcaccaacttcgacatgagccgctacgacgtgaagagcatcctggacagcagcgccctccccatcggcagcgccgccaagcgcctcaaggaggccgaggccgcagcgtccgcgcagcaccaccacgccggcgtggtgagctacgacgtcggccgcatcgcctcgcagctcggcgacggcggagccctggcggcggcgtacggcgcgcactaccacggcgccgcctggccgaccatcgcgttccagccgggcgccgccagcacaggcctgtaccacccgtacgcgcagcagccaatgcgcggcggcgggtggtgcaagcaggagcaggaccacgcggtgatcgcggccgcgcacagcctgcaggacctccaccacctgaacctgggcgcggccggcgcgcacgactttttctcggcagggcagcaggccgccgccgctgcgatgcacggcctgggtagcatcgacagtgcgtcgctcgagcacagcaccggctccaactccgtcgtctacaacggcggggtcggcgacagcaacggcgccagcgccgtcggcggcagtggcggtggctacatgatgccgatgagcgctgccggagcaaccactacatcggcaatggtgagccacgagcaggtgcatgcacgggcctacgacgaagccaagcaggctgctcagatggggtacgagagctacctggtgaacgcggagaacaatggtggcggaaggatgtctgcatgggggactgtcgtgtctgcagccgcggcggcagcagcaagcagcaacgacaacatggccgccgacgtcgggcatggcggcgcgcagctcttcagtgtctggaacgacacttaagcgtacgtgccggcctggctctccgaaagggcgtattccagcacactggcggccgttactagacccaacctagacttgtccatcttctggattggccaacttaattaatgtatgaaataaaaggatgcacacatagtgacatgctaatcactataatgtgggcatcaaagttgtgtgttatgtgtaattactagttatctgaataaaagagaaagagatcatccatatttcttatcctaaatgaatgtcacgtgtctttataattctttgatgaaccagatgcatttcattaaccaaatccatatacatataaatattaatcatatataattaatatcaattgggttagcaaaacaaatctagtctaggtgtgttttgcgaatgcggcctccgggcacccagctttcttgtacaaagtggccgttaacggatcggccagaatggcccggaccgggttaccccgcggttcaaagccaatgactgttgttaggtccagtttctaaggacgaatcatccaatcactggttctttctgaacaaaacaaagagctatagagttacgttactgtagccgagacagagcctgcaatctggttatgccacatactaggttctttcttaaagttgactcactctatcctaagttctacttacaaggagctacaacaaattggtcataaccggagagcgttcaaggaggtaatatcccatcttactctgtagcaaggctacaaaaggagagctaaagaactaggctacaaaaagagagctaaagaactaactatctagcaagactacagagctatagtgtagagatttcataaccggtgagcgttcaaggatactttgaagagaagaggtaatatctcaactagcaagactacaaaaaaatggagatataaaactaactgtctaacaagactacagagctatagtagagatagatacgttcgacacttaagcatgagaattcgagctcggtaccctggttcacaaactcaatacaacacacagtggagtagggtattacgctccggcggcccgaaccactctaaatccttgtgtcctcgtgtgctcttccaccattaatgactgtaattgcagggacacgaagagttgtagcgcttttgccaacaagatccgctatatgctagtagagtggaacctgcacagcaacaagcatccaataatctgagaataagaattatgtgtggtgatggttctcatctctgcaactcgccattttcgcgagagaaccaaatccaagttggtgaagatcatgatttgggctcatgggctggcatagtagctattacctttgcaattgtggttcgaatctatccgatattctccttttcagggagagctaatgcttatgcttattgggtattttggtttgacactgcttcacgcccaaaaaaaggcaactatgtctgagttggatatggcccaaaaaaaggcagctatgtctgagttggatatggaagtcttctttcgtttagggtgaagtaagaccaagctcatgagcttattatcttaggtcggaacaaattagttgataggcatggcacatttatcaaattataatgattttaacagaaaagcaacacctctttttcagcagcaccagctttgcaagctgcaattgacactccaagcatagtatttgctccaaactcagcctgcatttcgcacaatatcatatctatttccatttggataaaatatattttccagaaatatgggaacagaatcaagatacagaaaaaagttgtggtagtagtggtaagtggaaacacaagtacagtgaaaagatagcattatttctgaacagtcaaattaaccgaaataagtagtatcacatactgcccctaaattgactacacccaatgtaaagaattgcttgagcatattgagccatcagttgtttgtttgtgtaacggatttgacaatgcagagttcaggagcaaaaaaccgcaaaggagagaaagagggaaaggatctcctagtatcccaccttgtggcgcgccctgtcaagtgcatgatggcctggtcgatctgcgtctgctgctgcggttccatcccaacgagtgcctccgacaccttgtcgttgatcacccgcaccgcgtaggcgacccccctggcgaggaacttccgcctctcggaggccccggccgcgtcggcggcggcgccctcgagcgcgcccacgctagccgtagatgctcggtgcacggccttgttggtgtgcaactcgacctcaacggccggtgcgctacgcccgtcaaggatctggcgcgcccgcaccctcgtgatcacggtgggcgcctcccgcctcatgtggccgacgatgaaaagcgccgggttaggggccttggcgcgcaccgccgtattcagggcctcctcgctcttgcgcgagagcaggtgcttccccaggtactcctgcactgacaaggctgccacagcggtggaatttgtcctcacgacttcgccacgtcgtcctcacctccctggcttcccacgactccgccgtatcgaggtgctcggtgggtcgtcttaatccgaagtccgaactaggaagacgagacagagaggtctgaggaatgggcctcgtttgatgttgagctgaattatttttccagcataagcccaggtcttggtccatgaacaaaattactagaaacccagcccagtactacgatctaaaagagggactgccactggatagctctctctagcattctccacgctccaatacagcggcgtcgtgtctatccgggtctatccgcgaacacgtgagaactctccagaaactgctttctcctccacttcatctctctcgctttccctctataaaaagaccccttctaggaattgagggagacagcaagcaccaagcagcgatccgaagctcaatcaattcactcaaacctcttccccaaatcttcgattagatcttcgttgacaagaagactagaaccgaacctgacatgtccaacctgctcacggttcaccagaaccttccggctcttccagtggacgcgacgtccgatgaagtcaggaagaacctcatggacatgttccgcgacaggcaagcgttcagcgagcacacctggaagatgctgctctccgtctgccgctcctgggctgcatggtgcaagctgaacaacaggaagtggttccccgctgagcccgaggacgtgagggattaccttctgtacctgcaagcgcgaggtttgtttctgcttctacctttgatatatatataataattatcattaattagtagtaatataatatttcaaatatttttttcaaaataaaagaatgtagtatatagcaattgcttttctgtagtttataagtgtgtatattttaatttataacttttctaatatatgaccaaaacatggtgatgcctaggtctggcagtgaagaccatccagcaacaccttggacaactgaacatgcttcacaggcgctccggcctcccgcgccccagcgactcgaacgccgtgagcctcgtcatgcgccgcatcaggaaggaaaacgtcgatgccggcgaaagggcaaagcaggccctcgcgttcgagaggaccgatttcgaccaggtccgcagcctgatggagaacagcgacaggtgccaggacattaggaacctggcgttcctcggaattgcatacaacacgctcctcaggatcgcggaaattgcccgcattcgcgtgaaggacattagccgcaccgacggcggcaggatgcttatccacattggcaggaccaagacgctcgtttccaccgcaggcgtcgaaaaggccctcagcctcggagtgaccaagctcgtcgaacgctggatctccgtgtccggcgtcgcggacgacccaaacaactacctcttctgccgcgtccgcaagaacggggtggctgcccctagcgccaccagccaactcagcacgagggccttggaaggtattttcgaggccacccaccgcctgatctacggcgcgaaggatgacagcggtcaacgctacctcgcatggtccgggcactccgcccgcgttggagctgctagggacatggcccgcgccggtgtttccatccccgaaatcatgcaggcgggtggatggacgaacgtgaacattgtcatgaactacattcgcaaccttgacagcgagacgggcgcaatggttcgcctcctggaagatggtgactgaggtacccaacctagacttgtccatcttctggattggccaacttaattaatgtatgaaataaaaggatgcacacatagtgacatgctaatcactataatgtgggcatcaaagttgtgtgttatgtgtaattactagttatctgaataaaagagaaagagatcatccatatttcttatcctaaatgaatgtcacgtgtctttataattctttgatgaaccagatgcatttcattaaccaaatccatatacatataaatattaatcatatataattaatatcaattgggttagcaaaacaaatctagtctaggtgtgttttgcgatccgatatcgaattggccacggtaccagctgctgctgttctagggttcacaagtctgcctatttgtcttccccaatggagctatggttgtctggtctggtccttggtcgtgtcccgtttcattgtgtactatttacctgtaatgtgtatccttaagtctggtttgatggtgtctgaaacgttttgctgtggtagagcagcatggaagaactataatgaataagtgatccctaatcattgtgtccaaattttgcttctgctatacccttttgtgctgtttcttatgttttgcttaaaaatttgatctgacaaacaaatttgtctaaattatgctcttgttctgactgtgtactgtacacatttgtattgctaccggtttggcacatagttttctctttgattgcagatcaaacccttctgattgcagattgcttggctatggctgatgtgctcactgttcttctttagcttgtatattgctgatggtggcttggctacggctgaaaaagttgctgctgcgccgacttggcaactgttgctccagtaatgctttgtcctctcttcctagccgccgacttggcacttggcagctgttgctcctgtaatgcgttgttatctcttatctcttgagatgtactatgattttgaggctgtttgacttgtgccagattgccagtgctgatgctatattatctcaggtttttatgctagtatatgttttactgtgtgctgcctgtgtcgagttacgtaatctattgaaccgctatgcgtgttgatgccctgttgttgcttgccagattgatgcccctgttgcttgcagcttgcaagctgtagtgaaatcctaaaattccaaaccaaatctattctgaacttttgaagatctgtgatgtccggaagaaaagattcaaacagataaacgggactctccagaatctataaaataaatgatcgacaaacgctttgctttggtaggcttcaagcttggtcacccggtccgggcctagaaggccagcttcggccgccccgggcaactttattatacaaagttgatagataaatcagatatctggttcctaaggacccggcggaccgattaaactgattcggtccgacgcgttacctaataacttcgtatagcatacattatacgaagttattagctaactaactagtaagcttaagccatgggtcgacggatccgttaactagcgtggcatttggcaccgccgcacactatgcgagctaggagtgctagtttacagatgaaactatgaaaccaagaaaacacaattgtccgtagctagcgcgtggcgtcgtgtcaagcttcacacagtatcttcgttcttcactataaatcgcgcctgttgttcgtgagacccaccaccgtggataacagtcccctaataataagcgatcaacagcactgctgatggctgaacaccgaggcgccgccgcgcgtaaccatccgccggagcagcccgtcgtgccggcgaacgacgccttccccgaccgcgcccagcagctctgcctcgacgccgggcgcgcgctcgcgatgtgcggcgtgctcgtcgccgtccctcccgcattttacgcgtcgacgtcgcggacgacaccgcacttgccttcgtcggcttcgtcctctggatcatcggtgcgtggctgtgcctcctggcgctcacgcccttggctccacgggcggtgagggcgggcggggccgccgccagcaccttgctgatcaggtgcctgtccctttcatgaactactagcgcccgcgcccgcggccgccgggcacaagagaacacatcgatgttcgctgcgtacgtcagcaataaggcactctttgtcagtagtcgagtgcatatgttgggtgtttgccctgggagatttcaagtgttgtggccattatcccgcaggataaaaaatcggcggcttttggattgatacggaaaataacgatgtttcatgctcgtgttgtgtgtgtgacatcttgtcagccaagtttttaaccgttgctactccccctctgtgggctcagtgtgtggaccggaatacgtcgtacataggccgtagcctaagcccaatatgccgtttttcaggttggcctgtgtgacgacaagcgggtctcaaaagcccatcacgcaactggcctgcaattattggaggagagcgcgtcgagttggttccagaggctgcgtggtggggccggactctgcgacgacctctcgttcgcgtccgatttggttgccgtgagccgtgacgtaacgcctccttccgttcctccctatataagttccacccccgggtccggtttccccaagccccagtgacccccgatcccgatcgcgaaatctccgcacccgccggcaagggaccgaagcaagcctctctcccgaccgtcgcatcaaggtacgcgtccgctcgatctgtcctcttccttctcgatttgacttgctgtggtgcccgatcacgggatcagaatcgcaccagtgtagatttcgcatgttctaagatgtgttagtttccaggctaatccagttctcttgacgcccgatccgatcgagctccgtgtttatttcagcctaatcgtagtattcccctaaaatttcctcattagggggttcgcaagattgttggtcgacaggttcacttatgctcgatcgcttacttttagtcgattcatgctgcgtactattgttgccccccgtggttttatcttttctcgtgtgaaatccagtagatatagtagatatcgtagcattaggttttaattcaatcgattgattattgtatcatcaaaattgagaagttcgaatcatgcctatcatgctgcctcaaccgaaatcctgtatattgaagtttcaattcaattgattgatcattcattagattcaaccaaaatctagaaggttagatgacgcatgtcatgctgcctgcgtagtttacctttgatctgtttatgattaccttatcagtaggatatttgtgattttgggaagtagcactaactgattcatgctgacatgatgttccctttcagattatactgttgagtcctatctaattgatgctttgtatgctatatgaatacgtcatggtaaattagcagttaattagcatattagcaattgggcgtacctcatcaggattgctcttgtagatgtgtgtggtgatgtttcttgttcaattcatgttctgctttaaaagtatgtgttctctgtttgttaattaagattcatggttataatgatttggacctaattaatcagggttgcccttttagatgcgtggttacttgttgagttcatttttttcctgctatagttgtatgcgtttgttcattcatggttagatttgatttgtttcttctctattccatgccttccatatacttcaattgtagcttaacatgagatttctgtatatgcaggtcgaccgccggggatccacacgacaccatggcccagtccaagcacggcctgaccaaggagatgaccatgaagtaccgcatggagggctgcgtggacggccacaagttcgtgatcaccggcgagggcatcggctaccccttcaagggcaagcaggccatcaacctgtgcgtggtggagggcggccccttgcccttcgccgaggacatcttgtccgccgccttcatgtacggcaaccgcgtgttcaccgagtacccccaggacatcgtcgactacttcaagaactcctgccccgccggctacacctgggaccgctccttcctgttcgaggacggcgccgtgtgcatctgcaacgccgacatcaccgtgagcgtggaggagaactgcatgtaccacgagtccaagttctacggcgtgaacttccccgccgacggccccgtgatgaagaagatgaccgacaactgggagccctcctgcgagaagatcatccccgtgcccaagcagggcatcttgaagggcgacgtgagcatgtacctgctgctgaaggacggtggccgcttgcgctgccagttcgacaccgtgtacaaggccaagtccgtgccccgcaagatgcccgactggcacttcatccagcacaagctgacccgcgaggaccgcagcgacgccaagaaccagaagtggcacctgaccgagcacgccatcgcctccggctccgccttgccctccggactcagatctcgatagagtcaacctagacttgtccatcttctggattggccaacttaattaatgtatgaaataaaaggatgcacacatagtgacatgctaatcactataatgtgggcatcaaagttgtgtgttatgtgtaattactagttatctgaataaaagagaaagagatcatccatatttcttatcctaaatgaatgtcacgtgtctttataattctttgatgaaccagatgcatttcattaaccaaatccatatacatataaatattaatcatatataattaatatcaattgggttagcaaaacaaatctagtctaggtgtgttttgcgaattgcggcgcccttactttaacgcctctaaccaacacccctttatctttataaggaacaataaacagaatttgccccactgttctaaatcacctaataatatccccagctaaaaacaataaaggtttcctagaattaagacaagcatgactgttcctccaggagggtttggaacattgttgcagtcttgcagatacgggcgaagggtgagaaacagagcggagggctggaggtgacctcggtagtcgacgccggagttgagcttgacaacgacggggcggcccctgatggacttgaggaagtccgatggcgtcttcaccgtcccgccggcgcccgaggcgggcctgtcgctgccgccgccgccgctgctcatcttgcgcgctgtgcccccggcggtgtccctgtgttgcggatcgcgggtgggccaggtggatgcgagggcgacccgtttggactccggccggagccgccggatccctggtcggtgtcagtgccgtttactctgggccccacgtgtcagtaccgtctgtagatgacaacaacccgtcgtccacagtcatgtccaaaatatcctttcttcttttttttcgattcggatatctatcttccttttttttttccaaaaatcttcttgacgcaccagcgcgcacgtttgtggtaaacgccgacacgtcggtcccacgtcgatagaccccacccaccagtgagtagcgtgtacgtattcgggggtgacggacgtgtcgccgtcgtcttgctagtcccattcccatctgagccacacatctctgaacaaaaaaaaggagggaggcctccacgcacatccccctccgtgccacccgccccaaaccctcgcgccgcctccgagacagccgccgcaaccatggccaccgccgccgccgcgtctaccgcgctcactggcgccactaccgctgcgcccaaggcgaggcgccgggcgcacctcctggccacccgccgcgccctcgccgcgcccatcaggtgctcagcggcgtcacccgccatgccgatggctcccccggccaccccgctccggccgtggggccccaccgagccccgcaagggtgctgacatcctcgtcgagtccctcgagcgctgcggcgtccgcgacgtcttcgcctaccccggcggcgcgtccatggagatccaccaggcactcacccgctcccccgtcatcgccaaccacctcttccgccacgagcaaggggaggcctttgccgcctccggctacgcgcgctcctcgggccgcgtcggcgtctgcatcgccacctccggccccggcgccaccaacctagtctccgcgctcgccgacgcgctgctcgattccgtccccatggtcgccatcacgggacaggtggcgcgacgcatgattggcaccgacgccttccaggagacgcccatcgtcgaggtcacccgctccatcaccaagcacaactacctggtcctcgacgtcgacgacatcccccgcgtcgtgcaggaggctttcttcctcgcctcctctggtcgaccagggccggtgcttgtcgacatccccaaggacatccagcagcagatggcggtgcctgtctgggacaagcccatgagtctgcctgggtacattgcgcgccttcccaagccccctgcgactgagttgcttgagcaggtgctgcgtcttgttggtgaatcgcggcgccctgttctttatgtgggcggtggctgcgcagcatctggtgaggagttgcgacgctttgtggagctgactggaatcccggtcacaactactcttatgggcctcggcaacttccccagcgacgacccactgtctctgcgcatgctaggtatgcatgggacggtgtatgcaaattatgcagtggataaggccgatctgttgcttgcacttggtgtgcggtttgatgatcgcgtgacagggaagattgaggcttttgcaagcagggctaagattgtgcacgttgatattgatccggctgagattggcaagaacaagcagccacatgtgtccatctgtgcagatgttaagcttgctttgcagggcatgaatgctcttcttgaaggaagcacatcaaagaagagctttgactttggctcatggaacgatgagttggatcagcagaagagggaattcccccttgggtataaaacatctaatgaggagatccagccacaatatgctattcaggttcttgatgagctgacgaaaggcgaggccatcatcggcacaggtgttgggcagcaccagatgtgggcggcacagtactacacttacaagcggccaaggcagtggttgtcttcagctggtcttggggctatgggatttggtttgccggctgctgctggtgcttctgtggcaaacccaggtgtcactgttgttgacatcgatggagatggtagctttctcatgaacgttcaggagctagctatgatccgaattgagaacctcccagtgaaggtctttgtgctaaacaaccagcacctggggatggtggtgcagttggaggacaggttctataaggccaacagagcgcacacatacttgggaaacccagagaatgaaagtgagatatatccagatttcgtgacgatcgccaaagggttcaacattccagcggtccgtgtgacaaagaagaacgaagtccgcgcagcgataaagaagatgctcgagactccagggccgtacctcttggatataatcgtcccacaccaggagcatgtgttgcctatgatccctagtggtggggctttcaaggatatgatcctggatggtgatggcaggactgtgtactgactagctagtcagttaacagatctgccagatcctcggtgtacaaataacccgtcttatcctatgagacgggccggcgtcagtgtgttctggaggaatttttatgtcagagcctttttctttgtgtgcttgatgtagatgccaagggaagcttattggctgttgaagcttgatgcaaaataaattatggaactctgttttttgtttatctaataataactagcaaatatgcttccattgcattgaaactaacagccttttgtgtttccaagttttattttgtgacaatgtcatctatttcaattagttgtggaatcggaaacttgcaggactaacttggaaactccaatccctcagcatcctggactttttcctggtgtaatccatgtagatattattttaatcatcattttagttctggaggtttttccatctccggttttgctcccctttcttcaaaaaaaaaaaaaaaatgccgtaggcgccgcaacgcccacctgttgttcaaactcatgggcacgagtggctcgaagattttatacaacaattgctgtagtttcaccgttgctggtgaagaagcatttttttaaaaaaatatagtggtattcattttaattagtttagttgtgcagcgagcaaaatttggacatgctctgctcggaatctgatcgacctagacacagattagcagcagtagctttgtcatctgttccaagagttgcgatctgatagaagaaaaaaaaaccttcccttcaatgtaaaaccgaaactaacaagaaagaagcacagtgccgtttaggcaagtatggagtacgtattaagcatgtagaaggccatgcatgaaccactaacaagaaagaagcgcagtgccattcaggcaagcataagcatgtagattggcatgcatgaacaactaacagtagatcgtctctggtctgattagaagttttttgggaagccaagaaatcatgtacaactggttccatctcaaattccgtggcaaaaagaggcctaagcaacatacctcgagtagatcacattcaagcttggtcacccggtccgtcaatattctgattccgatgacttcgtaggttcctagctcaagccgctcgtgtccaagcgtcacttacgattagctaatgattacggcatctaggaccgactagtggcgcgccgactagctagctaaggtaccgagctcgaattcattccgattaatcgtggcctcttgctcttcaggatgaagagctatgtttaaacgtgcaagcgctactagacaattcagtacattaaaaacgtccgcaatgtgttattaagttgtctaagcgtcaatttgtttacaccacaatatatcctgcca

SEQ ID NO: 272 - DNA, 20976 bp, synthetic construct
  misc_feature 1..20976: note = PHP100056
  source 1..20976: mol_type = other DNA
gtttacccgccaatatatcctgtcaaacactgcggccgcacttgaccgcggatggagccggagctgtggtgaggccatcgacgggaggtgggggagaacacagtctcagtgttctttgtgagtccgcaaggtttttagcttttctgtattaattaaggttgctgttggctgtagaatacggtcgtggaagagctgtatcggtagctactacgtaagctattatatactggaagtctggagctcgtcgatctccggtcgtcttcctccatttctcctcgtcttgctttgactgctgctaccatttgcttctgttttctgatgaagcatgccatgtcggccaccagtgtttgtgtggtttttgcagggaatggctttcaagtgctgtgattgaatggccctcgtcgtcctcggctgagctcacatggacgcgtcatgtgagtgagatatatgatcatatgatgagtggggttcgggtgagtgcgtacttgaagtaggatcccgctttcactcattcattcattggcctttaaaccgggaaattttcgcgaggagatggagggaagcaagcagggtgacgagtgcagagtgccgcgagcgctttgtcaaaaggcaccgccgtaggcaaaaaaatcaatggccctgactgactcgatggtagtactactgtagagactagagagggttgctccccatatcttcgtgtgacttttactccagcattgcatttccgtcattgagacgttaattaatagcagctttcgggacagatgactgtggccatgtttcgtcacggccgcttcgtgccagctgggggtactatagtactgtgattttgttagtaaaaactttcattaggccaccattgacgaccgggccttcgcttttgctgcgctaattaaccatttcccggcgaccgaagggaacatgaacatgccccgacacatgagggcatgaggactagtgttctccctgtcgttcgttgacttgactagtgatagtttaaacgctcttcaactggaagagcggttactaccggttcactagctagctgctaatcgagctagttaccctatgaggtgacatgaagcgctcacggttactatgacggttagcttcacgactgttggtggcagtagcgtacgacttagctatagttccggacttacccttaagataacttcgtatagcatacattatacgaagttatgggcccacgcgtgaagagcggttaccagagctggtcacctttgtccaccaagatggaactgtcttcggccagaatggccatctggattcagcaggcctagaaggccatttatcgctatcaactttgtatagaaaagttgggccgaattcgagctcggtacggccagaatggcccggaccgaagcttgcggccgcacactgatagtttaaactgaaggcgggaaacgacaatctgatcatgagcggagaattaagggagtcacgttatgacccccgccgatgacgcgggacaagccgttttacgtttggaactgacagaaccgcaacgttgaaggagccactcagccgcgggtttctggagtttaatgagctaagcacatacgtcagaaaccattattgcgcgttcaaaagtcgcctaaggtcactatcagctagcaaatatttcttgtcaaaaatgctccactgacgttccataaattcccctcggtatccaattagagtctcatattcactctcccgggggatctcgactctagaggatcgctcaggaaggccgctgagatagaggcatggcggccaatgcgggcggcggtggagcgggaggaggcagcggcagcggcagcgtggctgcgccggcggtgtgccgccccagcggctcgcggtggacgccgacgccggagcagatcaggatgctgaaggagctctactacggctgcggcatccggtcgcccagctcggagcagatccagcgcatcaccgccatgctgcggcagcacggcaagatcgagggcaagaacgtcttctactggttccagaaccacaaggcccgcgagcgccagaagcgccgcctcaccagcctcgacgtcaacgtgcccgccgccggcgcggccgacgccaccaccagccaactcggcgtcctctcgctgtcgtcgccgccgccttcaggcgcggcgcctccctcgcccaccctcggcttctacgccgccggcaatggcggcggatcggctgtgctgctggacacgagttccgactggggcagcagcggcgctgccatggccaccgagacatgcttcctgcaggactacatgggcgtgacggacacgggcagctcgtcgcagtggccacgcttctcgtcgtcggacacgataatggcggcggccgcggcgcgggcggcgacgacgcgggcgcccgagacgctccctctcttcccgacctgcggcgacgacggcggcagcggtagcagcagctacttgccgttctggggtgccgcgtccacaactgccggcgccacttcttccgttgcgatccagcagcaacaccagctgcaggagcagtacagcttttacagcaacagcaacagcacccagctggccggcaccggcaaccaagacgtatcggcaacagcagcagcagccgccgccctggagctgagcctcagctcatggtgctccccttaccctgctgcagggagtatgtgagagcaacgcgagctgccactgctcttcactgatgtctctggaatggaaggaggaggaagtgagcatagcgttggtgcgttgctgtcaagggcgaattcacatggttaacctagacttgtccatcttctggattggccaacttaattaatgtatgaaataaaaggatgcacacatagtgacatgctaatcactataatgtgggcatcaaagttgtgtgttatgtgtaattactagttatctgaataaaagagaaagagatcatccatatttcttatcctaaatgaatgtcacgtgtctttataattctttgatgaaccagatgcatttcattaaccaaatccatatacatataaatattaatcatatataattaatatcaattgggttagcaaaacaaatctagtctaggtgtgttttgcgaatgcggccgccaccgcggtggagctcgaattccggtccgggcctagaaggccagcttcaagtttgtacaaaaaagcaggctccggccagaatggcccggaccgtcactgactagctaaacagcggccgcatcgagcagctggcttgtggggaccagacaaaaaaggaatggtgcagaattgttaggcgcacctaccaaaagcatctttgcctttattgcaaagataaagcagattcctctagtacaagtggggaacaaaataacgtggaaaagagctgtcctgacagcccactcactaatgcgtatgacgaacgcagtgacgaccacaaaactcgagcaacgagatcatgagccaatcaaagaggagtgatgtagacctaaagcaataatggagccatgacgtaagggcttacgcccatacgaaataattaaaggctgatgtgacctgtcggtctctcagaacctttactttttatgtttggcgtgtatttttaaatttccacggcaatgacgatgtgaccgtcgacccactaaaacattgctttgtcaaaagctaaaaaagatgatgcccgacagccacttgtgtgaagcatgagaagccggtccctccactaagaaaattagtgaagcatcttccagtggtccctccactcacagctcaatcagtgagcaacaggacgaaggaaatgacgtaagccatgacgtctaatcccagggcccggtgaccaatcgaattagcttggcgcgtggaccgaagcttgcatgcctgcaatttaaatgccttcagttggttttgctcctttttatttaaaccctttcttggactttttattggtttgtgttgaacctttggcacctgtagaacttataatctagagcaaactagttagtccaattatttgtgttgggcaattcaaccaccaaaattatttaggaaaaggtttgagcctatttccctttcagccgccacccttgccgtcgtcgtcgccattgttgccatcgtcctcgttgcatgctcacgatgaggttgtacctgatggatcgcgcagagcatgctcacgatgaggttgaggtatggcgtgttctgtacgacttcatcctctgtcaatgctcttgcgtcaccttccatcatgcgtgggcatgcaccaggtatggcgtgttgtcatgtactttctggtacattggttgttactatggaggctttgttgctgtggtctcccttggtactgcatacatggcctaaacacggttgggtgatgttgtgtcttgtcgcggaagtcgtggatcgatggtgtctgtctgggttccctccttgcgggttcgcgtggcggggactcgatcgtccgtcctgcctcgtaggcttgcctgacgaggacttggtcgttcgtcctgcctcgcaggcttgctcggcgaggacttggtcgttcctcccacctcgcggacttgctcggcaaatgggtcgtggagagtatgggcctcactatgggcaccccatttcctggtacccgacatagtgactaaaagtgactaaaatgagctttttaccccaccacctgccctcccccacgtgagctatgcgctgaacgagcaaagaagtaaataggggtaatgcagtaaatatacgtagtagttaatgctctttagtcagatttagtcactgacaccaaacgagatactttagtgactactaaagtttagtcaggtgactaaagaaaccaaacataacccttagtgtgaaccgatttaggcacactagcatatatcccgtgttaacgctacgatcttgaagagggaggagtcaacgacggcggtggcgcaagtggataagttgacgacagcgacgatgacaatgtgagtgaggagaagggggcagtggggacgcagaggatggaagagggggagggggtggataggggcagcagggtgggaggagggagagcgcgagtgagggagagagggcgccgggacgcatgggaagaggaagagatgaatcaaataatattatatattaaatttgagtaagtaagagagatttatctaacgatccgaattgttggttttgatgatctgttaagtttaggtgtaatttgtttgatggatttagtgatgattatatgtgtgggggtgatttagtttggttggttttacaaaagtttaaattttttttagattatatagtggtatagatagtcaaacagtagcggcaatgacatcacggtaaatgcgcgttggcatccaaatgcagctggacacaggtcacacagcctaacggatatatcatatatgtgaatcctaactgtacactgtctgaagtggacgaacggctctggcttcggcgtgttacgtgtatagtaggccccttttgaacgaacggcgcgggccggggccaccaccagcatctgcggcagggagaatcgcgttggttcgacgcaaacgctacccggcgcccccttgcccttggggccggctattttaccgcacccgttctcccctctctaccgcagatcagatcacactcgtagagagaaggaaaaatatccccaaaccctagctcccgatctcgggatccatggccactgtgaacaactggctcgctttctccctctccccgcaggagctgccgccctcccagacgacggactccacactcatctcggccgccaccgccgaccatgtctccggcgatgtctgcttcaacatcccccaagattggagcatgaggggatcagagctttcggcgctcgtcgcggagccgaagctggaggacttcctcggcggcatctccttctccgagcagcatcacaaggccaactgcaacatgatacccagcactagcagcacagtttgctacgcgagctcaggtgctagcaccggctaccatcaccagctgtaccaccagcccaccagctcagcgctccacttcgcggactccgtaatggtggcttcctcggccggtgtccacgacggcggtgccatgctcagcgcggccgccgctaacggtgtcgctggcgctgccagtgccaacggcggcggcatcgggctgtccatgattaagaactggctgcggagccaaccggcgcccatgcagccgagggtggcggcggctgagggcgcgcaggggctctctttgtccatgaacatggcggggacgacccaaggcgctgctggcatgccacttctcgctggagagcgcgcacgggcgcccgagagtgtatcgacgtcagcacagggtggagccgtcgtcgtcacggcgccgaaggaggatagcggtggcagcggtgttgccggcgctctagtagccgtgagcacggacacgggtggcagcggcggcgcgtcggctgacaacacggcaaggaagacggtggacacgttcgggcagcgcacgtcgatttaccgtggcgtgacaaggcatagatggactgggagatatgaggcacatctttgggataacagttgcagaagggaagggcaaactcgtaagggtcgtcaagtctatttaggtggctatgataaagaggagaaagctgctagggcttatgatcttgctgctctgaagtactggggtgccacaacaacaacaaattttccagtgagtaactacgaaaaggagctcgaggacatgaagcacatgacaaggcaggagtttgtagcgtctctgagaaggaagagcagtggtttctccagaggtgcatccatttacaggggagtgactaggcatcaccaacatggaagatggcaagcacggattggacgagttgcagggaacaaggatctttacttgggcaccttcagcacccaggaggaggcagcggaggcgtacgacatcgcggcgatcaagttccgcggcctcaacgccgtcaccaacttcgacatgagccgctacgacgtgaagagcatcctggacagcagcgccctccccatcggcagcgccgccaagcgcctcaaggaggccgaggccgcagcgtccgcgcagcaccaccacgccggcgtggtgagctacgacgtcggccgcatcgcctcgcagctcggcgacggcggagccctggcggcggcgtacggcgcgcactaccacggcgccgcctggccgaccatcgcgttccagccgggcgccgccagcacaggcctgtaccacccgtacgcgcagcagccaatgcgcggcggcgggtggtgcaagcaggagcaggaccacgcggtgatcgcggccgcgcacagcctgcaggacctccaccacctgaacctgggcgcggccggcgcgcacgactttttctcggcagggcagcaggccgccgccgctgcgatgcacggcctgggtagcatcgacagtgcgtcgctcgagcacagcaccggctccaactccgtcgtctacaacggcggggtcggcgacagcaacggcgccagcgccgtcggcggcagtggcggtggctacatgatgccgatgagcgctgccggagcaaccactacatcggcaatggtgagccacgagcaggtgcatgcacgggcctacgacgaagccaagcaggctgctcagatggggtacgagagctacctggtgaacgcggagaacaatggtggcggaaggatgtctgcatgggggactgtcgtgtctgcagccgcggcggcagcagcaagcagcaacgacaacatggccgccgacgtcgggcatggcggcgcgcagctcttcagtgtctggaacgacacttaagcgtacgtgccggcctggctctccgaaagggcgtattccagcacactggcggccgttactagacccaacctagacttgtccatcttctggattggccaacttaattaatgtatgaaataaaaggatgcacacatagtgacatgctaatcactataatgtgggcatcaaagttgtgtgttatgtgtaattactagttatctgaataaaagagaaagagatcatccatatttcttatcctaaatgaatgtcacgtgtctttataattctttgatgaaccagatgcatttcattaaccaaatccatatacatataaatattaatcatatataattaatatcaattgggttagcaaaacaaatctagtctaggtgtgttttgcgaatgcggcctccgggcacccagctttcttgtacaaagtggccgttaacggatcggccagaatggcccggaccgggttaccccgcggttcaaagccaatgactgttgttaggtccagtttctaaggacgaatcatccaatcactggttctttctgaacaaaacaaagagctatagagttacgttactgtagccgagacagagcctgcaatctggttatgccacatactaggttctttcttaaagttgactcactctatcctaagttctacttacaaggagctacaacaaattggtcataaccggagagcgttcaaggaggtaatatcccatcttactctgtagcaaggctacaaaaggagagctaaagaactaggctacaaaaagagagctaaagaactaactatctagcaagactacagagctatagtgtagagatttcataaccggtgagcgttcaaggatactttgaagagaagaggtaatatctcaactagcaagactacaaaaaaatggagatataaaactaactgtctaacaagactacagagctatagtagagatagatacgttcgacacttaagcatgagaattcgagctcggtaccctggttcacaaactcaatacaacacacagtggagtagggtattacgctccggcggcccgaaccactctaaatccttgtgtcctcgtgtgctcttccaccattaatgactgtaattgcagggacacgaagagttgtagcgcttttgccaacaagatccgctatatgctagtagagtggaacctgcacagcaacaagcatccaataatctgagaataagaattatgtgtggtgatggttctcatctctgcaactcgccattttcgcgagagaaccaaatccaagttggtgaagatcatgatttgggctcatgggctggcatagtagctattacctttgcaattgtggttcgaatctatccgatattctccttttcagggagagctaatgcttatgcttattgggtattttggtttgacactgcttcacgcccaaaaaaaggcaactatgtctgagttggatatggcccaaaaaaaggcagctatgtctgagttggatatggaagtcttctttcgtttagggtgaagtaagaccaagctcatgagcttattatcttaggtcggaacaaattagttgataggcatggcacatttatcaaattataatgattttaacagaaaagcaacacctctttttcagcagcaccagctttgcaagctgcaattgacactccaagcatagtatttgctccaaactcagcctgcatttcgcacaatatcatatctatttccatttggataaaatatattttccagaaatatgggaacagaatcaagatacagaaaaaagttgtggtagtagtggtaagtggaaacacaagtacagtgaaaagatagcattatttctgaacagtcaaattaaccgaaataagtagtatcacatactgcccctaaattgactacacccaatgtaaagaattgcttgagcatattgagccatcagttgtttgtttgtgtaacggatttgacaatgcagagttcaggagcaaaaaaccgcaaaggagagaaagagggaaaggatctcctagtatcccaccttgtggcgcgccctgtcaagtgcatgatggcctggtcgatctgcgtctgctgctgcggttccatcccaacgagtgcctccgacaccttgtcgttgatcacccgcaccgcgtaggcgacccccctggcgaggaacttccgcctctcggaggccccggccgcgtcggcggcggcgccctcgagcgcgcccacgctagccgtagatgctcggtgcacggccttgttggtgtgcaactcgacctcaacggccggtgcgctacgcccgtcaaggatctggcgcgcccgcaccctcgtgatcacggtgggcgcctcccgcctcatgtggccgacgatgaaaagcgccgggttaggggccttggcgcgcaccgccgtattcagggcctcctcgctcttgcgcgagagcaggtgcttccccaggtactcctgcactgacaaggctgccacagcggtggaatttgtcctcacgacttcgccacgtcgtcctcacctccctggcttcccacgactccgccgtatcgaggtgctcggtgggtcgtcttaatccgaagtccgaactaggaagacgagacagagaggtctgaggaatgggcctcgtttgatgttgagctgaattatttttccagcataagcccaggtcttggtccatgaacaaaattactagaaacccagcccagtactacgatctaaaagagggactgccactggatagctctctctagcattctccacgctccaatacagcggcgtcgtgtctatccgggtctatccgcgaacacgtgagaactctccagaaactgctttctcctccacttcatctctctcgctttccctctataaaaagaccccttctaggaattgagggagacagcaagcaccaagcagcgatccgaagctcaatcaattcactcaaacctcttccccaaatcttcgattagatcttcgttgacaagaagactagaaccgaacctgacatgtccaacctgctcacggttcaccagaaccttccggctcttccagtggacgcgacgtccgatgaagtcaggaagaacctcatggacatgttccgcgacaggcaagcgttcagcgagcacacctggaagatgctgctctccgtctgccgctcctgggctgcatggtgcaagctgaacaacaggaagtggttccccgctgagcccgaggacgtgagggattaccttctgtacctgcaagcgcgaggtttgtttctgcttctacctttgatatatatataataattatcattaattagtagtaatataatatttcaaatatttttttcaaaataaaagaatgtagtatatagcaattgcttttctgtagtttataagtgtgtatattttaatttataacttttctaatatatgaccaaaacatggtgatgcctaggtctggcagtgaagaccatccagcaacaccttggacaactgaacatgcttcacaggcgctccggcctcccgcgccccagcgactcgaacgccgtgagcctcgtcatgcgccgcatcaggaaggaaaacgtcgatgccggcgaaagggcaaagcaggccctcgcgttcgagaggaccgatttcgaccaggtccgcagcctgatggagaacagcgacaggtgccaggacattaggaacctggcgttcctcggaattgcatacaacacgctcctcaggatcgcggaaattgcccgcattcgcgtgaaggacattagccgcaccgacggcggcaggatgcttatccacattggcaggaccaagacgctcgtttccaccgcaggcgtcgaaaaggccctcagcctcggagtgaccaagctcgtcgaacgctggatctccgtgtccggcgtcgcggacgacccaaacaactacctcttctgccgcgtccgcaagaacggggtggctgcccctagcgccaccagccaactcagcacgagggccttggaaggtattttcgaggccacccaccgcctgatctacggcgcgaaggatgacagcggtcaacgctacctcgcatggtccgggcactccgcccgcgttggagctgctagggacatggcccgcgccggtgtttccatccccgaaatcatgcaggcgggtggatggacgaacgtgaacattgtcatgaactacattcgcaaccttgacagcgagacgggcgcaatggttcgcctcctggaagatggtgactgaggtacccaacctagacttgtccatcttctggattggccaacttaattaatgtatgaaataaaaggatgcacacatagtgacatgctaatcactataatgtgggcatcaaagttgtgtgttatgtgtaattactagttatctgaataaaagagaaagagatcatccatatttcttatcctaaatgaatgtcacgtgtctttataattctttgatgaaccagatgcatttcattaaccaaatccatatacatataaatattaatcatatataattaatatcaattgggttagcaaaacaaatctagtctaggtgtgttttgcgatccgatatcgaattggccacggtaccagctgctgctgttctagggttcacaagtctgcctatttgtcttccccaatggagctatggttgtctggtctggtccttggtcgtgtcccgtttcattgtgtactatttacctgtaatgtgtatccttaagtctggtttgatggtgtctgaaacgttttgctgtggtagagcagcatggaagaactataatgaataagtgatccctaatcattgtgtccaaattttgcttctgctatacccttttgtgctgtttcttatgttttgcttaaaaatttgatctgacaaacaaatttgtctaaattatgctcttgttctgactgtgtactgtacacatttgtattgctaccggtttggcacatagttttctctttgattgcagatcaaacccttctgattgcagattgcttggctatggctgatgtgctcactgttcttctttagcttgtatattgctgatggtggcttggctacggctgaaaaagttgctgctgcgccgacttggcaactgttgctccagtaatgctttgtcctctcttcctagccgccgacttggcacttggcagctgttgctcctgtaatgcgttgttatctcttatctcttgagatgtactatgattttgaggctgtttgacttgtgccagattgccagtgctgatgctatattatctcaggtttttatgctagtatatgttttactgtgtgctgcctgtgtcgagttacgtaatctattgaaccgctatgcgtgttgatgccctgttgttgcttgccagattgatgcccctgttgcttgcagcttgcaagctgtagtgaaatcctaaaattccaaaccaaatctattctgaacttttgaagatctgtgatgtccggaagaaaagattcaaacagataaacgggactctccagaatctataaaataaatgatcgacaaacgctttgctttggtaggcttcaagcttggtcacccggtccgggcctagaaggccagcttcggccgccccgggcaactttattatacaaagttgatagataaatcagatatctggttcctaaggacccggcggaccgattaaactgattcggtccgacgcgttacctaataacttcgtatagcatacattatacgaagttattagctaactaactagtaagcttaagccatgggtcgacggatccgttaactagcgtggcatttggcaccgccgcacactatgcgagctaggagtgctagtttacagatgaaactatgaaaccaagaaaacacaattgtccgtagctagcgcgtggcgtcgtgtcaagcttcacacagtatcttcgttcttcactataaatcgcgcctgttgttcgtgagacccaccaccgtggataacagtcccctaataataagcgatcaacagcactgctgatggctgaacaccgaggcgccgccgcgcgtaaccatccgccggagcagcccgtcgtgccggcgaacgacgccttccccgaccgcgcccagcagctctgcctcgacgccgggcgcgcgctcgcgatgtgcggcgtgctcgtcgccgtccctcccgcattttacgcgtcgacgtcgcggacgacaccgcacttgccttcgtcggcttcgtcctctggatcatcggtgcgtggctgtgcctcctggcgctcacgcccttggctccacgggcggtgagggcgggcggggccgccgccagcaccttgctgatcaggtgcctgtccctttcatgaactactagcgcccgcgcccgcggccgccgggcacaagagaacacatcgatgttcgctgcgtacgtcagcaataaggcactctttgtcagtagtcgagtgcatatgttgggtgtttgccctgggagatttcaagtgttgtggccattatcccgcaggataaaaaatcggcggcttttggattgatacggaaaataacgatgtttcatgctcgtgttgtgtgtgtgacatcttgtcagccaagtttttaaccgttgctactccccctctgtgggctcagtgtgtggaccggaatacgtcgtacataggccgtagcctaagcccaatatgccgtttttcaggttggcctgtgtgacgacaagcgggtctcaaaagcccatcacgcaactggcctgcaattattggaggagagcgcgtcgagttggttccagaggctgcgtggtggggccggactctgcgacgacctctcgttcgcgtccgatttggttgccgtgagccgtgacgtaacgcctccttccgttcctccctatataagttccacccccgggtccggtttccccaagccccagtgacccccgatcccgatcgcgaaatctccgcacccgccggcaagggaccgaagcaagcctctctcccgaccgtcgcatcaaggtacgcgtccgctcgatctgtcctcttccttctcgatttgacttgctgtggtgcccgatcacgggatcagaatcgcaccagtgtagatttcgcatgttctaagatgtgttagtttccaggctaatccagttctcttgacgcccgatccgatcgagctccgtgtttatttcagcctaatcgtagtattcccctaaaatttcctcattagggggttcgcaagattgttggtcgacaggttcacttatgctcgatcgcttacttttagtcgattcatgctgcgtactattgttgccccccgtggttttatcttttctcgtgtgaaatccagtagatatagtagatatcgtagcattaggttttaattcaatcgattgattattgtatcatcaaaattgagaagttcgaatcatgcctatcatgctgcctcaaccgaaatcctgtatattgaagtttcaattcaattgattgatcattcattagattcaaccaaaatctagaaggttagatgacgcatgtcatgctgcctgcgtagtttacctttgatctgtttatgattaccttatcagtaggatatttgtgattttgggaagtagcactaactgattcatgctgacatgatgttccctttcagattatactgttgagtcctatctaattgatgctttgtatgctatatgaatacgtcatggtaaattagcagttaattagcatattagcaattgggcgtacctcatcaggattgctcttgtagatgtgtgtggtgatgtttcttgttcaattcatgttctgctttaaaagtatgtgttctctgtttgttaattaagattcatggttataatgatttggacctaattaatcagggttgcccttttagatgcgtggttacttgttgagttcatttttttcctgctatagttgtatgcgtttgttcattcatggttagatttgatttgtttcttctctattccatgccttccatatacttcaattgtagcttaacatgagatttctgtatatgcaggtcgaccgccggggatccacacgacaccatggcccagtccaagcacggcctgaccaaggagatgaccatgaagtaccgcatggagggctgcgtggacggccacaagttcgtgatcaccggcgagggcatcggctaccccttcaagggcaagcaggccatcaacctgtgcgtggtggagggcggccccttgcccttcgccgaggacatcttgtccgccgccttcatgtacggcaaccgcgtgttcaccgagtacccccaggacatcgtcgactacttcaagaactcctgccccgccggctacacctgggaccgctccttcctgttcgaggacggcgccgtgtgcatctgcaacgccgacatcaccgtgagcgtggaggagaactgcatgtaccacgagtccaagttctacggcgtgaacttccccgccgacggccccgtgatgaagaagatgaccgacaactgggagccctcctgcgagaagatcatccccgtgcccaagcagggcatcttgaagggcgacgtgagcatgtacctgctgctgaaggacggtggccgcttgcgctgccagttcgacaccgtgtacaaggccaagtccgtgccccgcaagatgcccgactggcacttcatccagcacaagctgacccgcgaggaccgcagcgacgccaagaaccagaagtggcacctgaccgagcacgccatcgcctccggctccgccttgccctccggactcagatctcgatagagtcaacctagacttgtccatcttctggattggccaacttaattaatgtatgaaataaaaggatgcacacatagtgacatgctaatcactataatgtgggcatcaaagttgtgtgttatgtgtaattactagttatctgaataaaagagaaagagatcatccatatttcttatcctaaatgaatgtcacgtgtctttataattctttgatgaaccagatgcatttcattaaccaaatccatatacatataaatattaatcatatataattaatatcaattgggttagcaaaacaaatctagtctaggtgtgttttgcgaattgcggcgcccttactttaacgcctctaaccaacacccctttatctttataaggaacaataaacagaatttgccccactgttctaaatcacctaataatatccccagctaaaaacaataaaggtttcctagaattaagacaagcatgactgttcctccaggagggtttggaacattgttgcagtcttgcagatacgggcgaagggtgagaaacagagcggagggctggaggtgacctcggtagtcgacgccggagttgagcttgacaacgacggggcggcccctgatggacttgaggaagtccgatggcgtcttcaccgtcccgccggcgcccgaggcgggcctgtcgctgccgccgccgccgctgctcatcttgcgcgctgtgcccccggcggtgtccctgtgttgcggatcgcgggtgggccaggtggatgcgagggcgacccgtttggactccggccggagccgccggatccctggtcggtgtcagtgccgtttactctgggccccacgtgtcagtaccgtctgtagatgacaacaacccgtcgtccacagtcatgtccaaaatatcctttcttcttttttttcgattcggatatctatcttccttttttttttccaaaaatcttcttgacgcaccagcgcgcacgtttgtggtaaacgccgacacgtcggtcccacgtcgatagaccccacccaccagtgagtagcgtgtacgtattcgggggtgacggacgtgtcgccgtcgtcttgctagtcccattcccatctgagccacacatctctgaacaaaaaaaaggagggaggcctccacgcacatccccctccgtgccacccgccccaaaccctcgcgccgcctccgagacagccgccgcaaccatggccaccgccgccgccgcgtctaccgcgctcactggcgccactaccgctgcgcccaaggcgaggcgccgggcgcacctcctggccacccgccgcgccctcgccgcgcccatcaggtgctcagcggcgtcacccgccatgccgatggctcccccggccaccccgctccggccgtggggccccaccgagccccgcaagggtgctgacatcctcgtcgagtccctcgagcgctgcggcgtccgcgacgtcttcgcctaccccggcggcgcgtccatggagatccaccaggcactcacccgctcccccgtcatcgccaaccacctcttccgccacgagcaaggggaggcctttgccgcctccggctacgcgcgctcctcgggccgcgtcggcgtctgcatcgccacctccggccccggcgccaccaacctagtctccgcgctcgccgacgcgctgctcgattccgtccccatggtcgccatcacgggacaggtggcgcgacgcatgattggcaccgacgccttccaggagacgcccatcgtcgaggtcacccgctccatcaccaagcacaactacctggtcctcgacgtcgacgacatcccccgcgtcgtgcaggaggctttcttcctcgcctcctctggtcgaccagggccggtgcttgtcgacatccccaaggacatccagcagcagatggcggtgcctgtctgggacaagcccatgagtctgcctgggtacattgcgcgccttcccaagccccctgcgactgagttgcttgagcaggtgctgcgtcttgttggtgaatcgcggcgccctgttctttatgtgggcggtggctgcgcagcatctggtgaggagttgcgacgctttgtggagctgactggaatcccggtcacaactactcttatgggcctcggcaacttccccagcgacgacccactgtctctgcgcatgctaggtatgcatgggacggtgtatgcaaattatgcagtggataaggccgatctgttgcttgcacttggtgtgcggtttgatgatcgcgtgacagggaagattgaggcttttgcaagcagggctaagattgtgcacgttgatattgatccggctgagattggcaagaacaagcagccacatgtgtccatctgtgcagatgttaagcttgctttgcagggcatgaatgctcttcttgaaggaagcacatcaaagaagagctttgactttggctcatggaacgatgagttggatcagcagaagagggaattcccccttgggtataaaacatctaatgaggagatccagccacaatatgctattcaggttcttgatgagctgacgaaaggcgaggccatcatcggcacaggtgttgggcagcaccagatgtgggcggcacagtactacacttacaagcggccaaggcagtggttgtcttcagctggtcttggggctatgggatttggtttgccggctgctgctggtgcttctgtggcaaacccaggtgtcactgttgttgacatcgatggagatggtagctttctcatgaacgttcaggagctagctatgatccgaattgagaacctcccagtgaaggtctttgtgctaaacaaccagcacctggggatggtggtgcagttggaggacaggttctataaggccaacagagcgcacacatacttgggaaacccagagaatgaaagtgagatatatccagatttcgtgacgatcgccaaagggttcaacattccagcggtccgtgtgacaaagaagaacgaagtccgcgcagcgataaagaagatgctcgagactccagggccgtacctcttggatataatcgtcccacaccaggagcatgtgttgcctatgatccctagtggtggggctttcaaggatatgatcctggatggtgatggcaggactgtgtactgactagctagtcagttaacagatctgccagatcctcggtgtacaaataacccgtcttatcctatgagacgggccggcgtcagtgtgttctggaggaatttttatgtcagagcctttttctttgtgtgcttgatgtagatgccaagggaagcttattggctgttgaagcttgatgcaaaataaattatggaactctgttttttgtttatctaataataactagcaaatatgcttccattgcattgaaactaacagccttttgtgtttccaagttttattttgtgacaatgtcatctatttcaattagttgtggaatcggaaacttgcaggactaacttggaaactccaatccctcagcatcctggactttttcctggtgtaatccatgtagatattattttaatcatcattttagttctggaggtttttccatctccggttttgctcccctttcttcaaaaaaaaaaaaaaaatgccgtaggcgccgcaacgcccacctgttgttcaaactcatgggcacgagtggctcgaagattttatacaacaattgctgtagtttcaccgttgctggtgaagaagcatttttttaaaaaaatatagtggtattcattttaattagtttagttgtgcagcgagcaaaatttggacatgctctgctcggaatctgatcgacctagacacagattagcagcagtagctttgtcatctgttccaagagttgcgatctgatagaagaaaaaaaaaccttcccttcaatgtaaaaccgaaactaacaagaaagaagcacagtgccgtttaggcaagtatggagtacgtattaagcatgtagaaggccatgcatgaaccactaacaagaaagaagcgcagtgccattcaggcaagcataagcatgtagattggcatgcatgaacaactaacagtagatcgtctctggtctgattagaagttttttgggaagccaagaaatcatgtacaactggttccatctcaaattccgtggcaaaaagaggcctaagcaacatacctcgagtagatcacattcaagcttggtcacccggtccgtcaatattctgattccgatgacttcgtaggttcctagctcaagccgctcgtgtccaagcgtcacttacgattagctaatgattacggcatctaggaccgactagtggcgcgccgactagctagctaaggtaccgagctcgaattcattccgattaatcgtggcctcttgctcttcaggatgaagagctatgtttaaacgtgcaagcgctactagacaattcagtacattaaaaacgtccgcaatgtgttattaagttgtctaagcgtcaatttgtttacaccacaatatatcctgcca

SEQ ID NO: 273 - DNA, 21374 bp, synthetic construct
  misc_feature 1..21374: note = PHP100057
  source 1..21374: mol_type = other DNA
gtttacccgccaatatatcctgtcaaacactgcggccgcacttgaccgcggatggagccggagctgtggtgaggccatcgacgggaggtgggggagaacacagtctcagtgttctttgtgagtccgcaaggtttttagcttttctgtattaattaaggttgctgttggctgtagaatacggtcgtggaagagctgtatcggtagctactacgtaagctattatatactggaagtctggagctcgtcgatctccggtcgtcttcctccatttctcctcgtcttgctttgactgctgctaccatttgcttctgttttctgatgaagcatgccatgtcggccaccagtgtttgtgtggtttttgcagggaatggctttcaagtgctgtgattgaatggccctcgtcgtcctcggctgagctcacatggacgcgtcatgtgagtgagatatatgatcatatgatgagtggggttcgggtgagtgcgtacttgaagtaggatcccgctttcactcattcattcattggcctttaaaccgggaaattttcgcgaggagatggagggaagcaagcagggtgacgagtgcagagtgccgcgagcgctttgtcaaaaggcaccgccgtaggcaaaaaaatcaatggccctgactgactcgatggtagtactactgtagagactagagagggttgctccccatatcttcgtgtgacttttactccagcattgcatttccgtcattgagacgttaattaatagcagctttcgggacagatgactgtggccatgtttcgtcacggccgcttcgtgccagctgggggtactatagtactgtgattttgttagtaaaaactttcattaggccaccattgacgaccgggccttcgcttttgctgcgctaattaaccatttcccggcgaccgaagggaacatgaacatgccccgacacatgagggcatgaggactagtgttctccctgtcgttcgttgacttgactagtgatagtttaaacgctcttcaactggaagagcggttactaccggttcactagctagctgctaatcgagctagttaccctatgaggtgacatgaagcgctcacggttactatgacggttagcttcacgactgttggtggcagtagcgtacgacttagctatagttccggacttacccttaagataacttcgtatagcatacattatacgaagttatgggcccacgcgtgaagagcggttaccagagctggtcacctttgtccaccaagatggaactgtcttcggccagaatggccatctggattcagcaggcctagaaggccatttatcgctatcaactttgtatagaaaagttgggccgaattcgagctcggtacggccagaatggcccggaccgaagcttgcggccgcacactgatagtttaaactgaaggcgggaaacgacaatctgatcatgagcggagaattaagggagtcacgttatgacccccgccgatgacgcgggacaagccgttttacgtttggaactgacagaaccgcaacgttgaaggagccactcagccgcgggtttctggagtttaatgagctaagcacatacgtcagaaaccattattgcgcgttcaaaagtcgcctaaggtcactatcagctagcaaatatttcttgtcaaaaatgctccactgacgttccataaattcccctcggtatccaattagagtctcatattcactctcccgggggatctcgactctagaggatcgctcaggaaggccgctgagatagaggcatggcggccaatgcgggcggcggtggagcgggaggaggcagcggcagcggcagcgtggctgcgccggcggtgtgccgccccagcggctcgcggtggacgccgacgccggagcagatcaggatgctgaaggagctctactacggctgcggcatccggtcgcccagctcggagcagatccagcgcatcaccgccatgctgcggcagcacggcaagatcgagggcaagaacgtcttctactggttccagaaccacaaggcccgcgagcgccagaagcgccgcctcaccagcctcgacgtcaacgtgcccgccgccggcgcggccgacgccaccaccagccaactcggcgtcctctcgctgtcgtcgccgccgccttcaggcgcggcgcctccctcgcccaccctcggcttctacgccgccggcaatggcggcggatcggctgtgctgctggacacgagttccgactggggcagcagcggcgctgccatggccaccgagacatgcttcctgcaggactacatgggcgtgacggacacgggcagctcgtcgcagtggccacgcttctcgtcgtcggacacgataatggcggcggccgcggcgcgggcggcgacgacgcgggcgcccgagacgctccctctcttcccgacctgcggcgacgacggcggcagcggtagcagcagctacttgccgttctggggtgccgcgtccacaactgccggcgccacttcttccgttgcgatccagcagcaacaccagctgcaggagcagtacagcttttacagcaacagcaacagcacccagctggccggcaccggcaaccaagacgtatcggcaacagcagcagcagccgccgccctggagctgagcctcagctcatggtgctccccttaccctgctgcagggagtatgtgagagcaacgcgagctgccactgctcttcactgatgtctctggaatggaaggaggaggaagtgagcatagcgttggtgcgttgctgtcaagggcgaattcacatggttaacctagacttgtccatcttctggattggccaacttaattaatgtatgaaataaaaggatgcacacatagtgacatgctaatcactataatgtgggcatcaaagttgtgtgttatgtgtaattactagttatctgaataaaagagaaagagatcatccatatttcttatcctaaatgaatgtcacgtgtctttataattctttgatgaaccagatgcatttcattaaccaaatccatatacatataaatattaatcatatataattaatatcaattgggttagcaaaacaaatctagtctaggtgtgttttgcgaatgcggccgccaccgcggtggagctcgaattccggtccgggcctagaaggccagcttcaagtttgtacaaaaaagcaggctccggccagaatggcccggaccgtcactgactagctaaacagcggccgcatcgagcagctggcttgtggggaccagacaaaaaaggaatggtgcagaattgttaggcgcacctaccaaaagcatctttgcctttattgcaaagataaagcagattcctctagtacaagtggggaacaaaataacgtggaaaagagctgtcctgacagcccactcactaatgcgtatgacgaacgcagtgacgaccacaaaactcgagcaacgagatcatgagccaatcaaagaggagtgatgtagacctaaagcaataatggagccatgacgtaagggcttacgcccatacgaaataattaaaggctgatgtgacctgtcggtctctcagaacctttactttttatgtttggcgtgtatttttaaatttccacggcaatgacgatgtgaccgtcgacccactaaaacattgctttgtcaaaagctaaaaaagatgatgcccgacagccacttgtgtgaagcatgagaagccggtccctccactaagaaaattagtgaagcatcttccagtggtccctccactcacagctcaatcagtgagcaacaggacgaaggaaatgacgtaagccatgacgtctaatcccagggcccggtgaccaatcgaattagcttggcgcgtggaccgaagcttgcatgcctgcaggtaccattattttccccccattttctcattttagaagcaacaatttactattacaatttctgttatcattttctatttttcatttacaaactgaggtcaaattcaggttttcaataaatgcatgataaccacatcatcaacaagagatgtgccattctttatttgtttattagttacttaactaatttaatactctttgttggttataaataggaagggtcctaatgaagtttcaaaggtttcaacaattctcctaacttcattataaatatatttatttatttatttatttattttatatatttttgtcacttctaccaattttgacctttagagtttataatacaaaacagtgttttgtaagtaaatacacgtttttgttgaacctaatagggtttttaccatcgagtatcagactatccacactcatataactctaaatttctaccatatgagaatatattgtacttgtcagcaaaaaactttacttataccacaattttccgtagtcatatctgctatatatctcaactctataccaaccgcaacatattatatcatttttgtctctttcctctcacctactcgcccaactcctcctggcttggtgacttctgtgcctgcacgtccaatgccatatggagaacatagaagagatggagtaagcctctccctaccacccataccttttagggtagatcgctacaacgtttcagttgctgcaaagaagacccaatatcatcaggtcgctcaatgcggatagcctcaatctatccacattcatcctactctaaaaagaatactccatcttagtcattaatattttaaaatacaatagagtcctacatctacaactattctatatctcaactcgatataactactacattttgatgaatatatatcgaacacatccggttaattgtgggcttgtggcgttgtgttcatgtcgccgccccacaaccacaagctcggcgggtcggcctcattgctgcatagcgttcgaacttcgaaccgtacaaacagtatctgaccgtttcctgtcggttgctgtaaagtagcgtcacgtatagagtagctgcagcacatttcgtacatacctcgagtagcgtagcgcaccctagtgtgtcactgtggacagcctcagggtctgtttggttgggctgtggctgtgaaaaaagttgctgtgggctgtgagctgtggaaaaagctgctgtaggctgtaagctgttaaaaagctaaaaaccgtttggtagaaaccactaaaagtcgttaaaaatccttcgatatatgttttcatagttccatccgaaaagccactaaaagcaggtccagaggtgctttcagatttgcactacaagaaaatcggtttttagaaaaagctgcttcctggatccagccctttggttggcttttggcttttaggggggcaaaagccaaagtcaaaagttaaaccaaacacaccctcagtcacccattcacatctctaccctagtgcgcttcccttataaaacctagctcctcaagctccagacgcagtcgaccgccgcagaccgggagtagtcgacgcgccgtcactgaatcctcagatcacggctagccgtaatcacgccactctgctgactcccggcgaggtactctgacgcatgcgcgagcgcttctcttcttctcttttcgctgtgcttttagtctgttcgtttgatgcccagatctactaggtttgtgtgatgagccgagccgatttatgcactggatttttagtcaagtgttgtttccgcctccgctatctttagtgtctatgtctgaatttgggttcagtgattatcgagctataaattatagttgttgcgctgttctatactagatccagttaccgatctatgatattacggggttgagcgattcatgtgctggagtactagtccaagatttgcttccgtctcctcatctacctttagtatgtactctgtatataaacttaattgcagtttgcaactgattctcggccatatattacttccgttgcgttgttcattagatccatttccgatccctgatattacgtgggtggggggtacttcgactttgttttttccggattgtttgattactggtctattcccatacatatttgtttctcattgattttatataattttgatgtaagcagcagtgtaacattttccttcagccccatggccactgtgaacaactggctcgctttctccctctccccgcaggagctgccgccctcccagacgacggactccacactcatctcggccgccaccgccgaccatgtctccggcgatgtctgcttcaacatcccccaagattggagcatgaggggatcagagctttcggcgctcgtcgcggagccgaagctggaggacttcctcggcggcatctccttctccgagcagcatcacaaggccaactgcaacatgatacccagcactagcagcacagtttgctacgcgagctcaggtgctagcaccggctaccatcaccagctgtaccaccagcccaccagctcagcgctccacttcgcggactccgtaatggtggcttcctcggccggtgtccacgacggcggtgccatgctcagcgcggccgccgctaacggtgtcgctggcgctgccagtgccaacggcggcggcatcgggctgtccatgattaagaactggctgcggagccaaccggcgcccatgcagccgagggtggcggcggctgagggcgcgcaggggctctctttgtccatgaacatggcggggacgacccaaggcgctgctggcatgccacttctcgctggagagcgcgcacgggcgcccgagagtgtatcgacgtcagcacagggtggagccgtcgtcgtcacggcgccgaaggaggatagcggtggcagcggtgttgccggcgctctagtagccgtgagcacggacacgggtggcagcggcggcgcgtcggctgacaacacggcaaggaagacggtggacacgttcgggcagcgcacgtcgatttaccgtggcgtgacaaggcatagatggactgggagatatgaggcacatctttgggataacagttgcagaagggaagggcaaactcgtaagggtcgtcaagtctatttaggtggctatgataaagaggagaaagctgctagggcttatgatcttgctgctctgaagtactggggtgccacaacaacaacaaattttccagtgagtaactacgaaaaggagctcgaggacatgaagcacatgacaaggcaggagtttgtagcgtctctgagaaggaagagcagtggtttctccagaggtgcatccatttacaggggagtgactaggcatcaccaacatggaagatggcaagcacggattggacgagttgcagggaacaaggatctttacttgggcaccttcagcacccaggaggaggcagcggaggcgtacgacatcgcggcgatcaagttccgcggcctcaacgccgtcaccaacttcgacatgagccgctacgacgtgaagagcatcctggacagcagcgccctccccatcggcagcgccgccaagcgcctcaaggaggccgaggccgcagcgtccgcgcagcaccaccacgccggcgtggtgagctacgacgtcggccgcatcgcctcgcagctcggcgacggcggagccctggcggcggcgtacggcgcgcactaccacggcgccgcctggccgaccatcgcgttccagccgggcgccgccagcacaggcctgtaccacccgtacgcgcagcagccaatgcgcggcggcgggtggtgcaagcaggagcaggaccacgcggtgatcgcggccgcgcacagcctgcaggacctccaccacctgaacctgggcgcggccggcgcgcacgactttttctcggcagggcagcaggccgccgccgctgcgatgcacggcctgggtagcatcgacagtgcgtcgctcgagcacagcaccggctccaactccgtcgtctacaacggcggggtcggcgacagcaacggcgccagcgccgtcggcggcagtggcggtggctacatgatgccgatgagcgctgccggagcaaccactacatcggcaatggtgagccacgagcaggtgcatgcacgggcctacgacgaagccaagcaggctgctcagatggggtacgagagctacctggtgaacgcggagaacaatggtggcggaaggatgtctgcatgggggactgtcgtgtctgcagccgcggcggcagcagcaagcagcaacgacaacatggccgccgacgtcgggcatggcggcgcgcagctcttcagtgtctggaacgacacttaagcgtacgtgccggcctggctctccgaaagggcgtattccagcacactggcggccgttactagacccaacctagacttgtccatcttctggattggccaacttaattaatgtatgaaataaaaggatgcacacatagtgacatgctaatcactataatgtgggcatcaaagttgtgtgttatgtgtaattactagttatctgaataaaagagaaagagatcatccatatttcttatcctaaatgaatgtcacgtgtctttataattctttgatgaaccagatgcatttcattaaccaaatccatatacatataaatattaatcatatataattaatatcaattgggttagcaaaacaaatctagtctaggtgtgttttgcgaatgcggcctccgggcacccagctttcttgtacaaagtggccgttaacggatcggccagaatggcccggaccgggttaccccgcggttcaaagccaatgactgttgttaggtccagtttctaaggacgaatcatccaatcactggttctttctgaacaaaacaaagagctatagagttacgttactgtagccgagacagagcctgcaatctggttatgccacatactaggttctttcttaaagttgactcactctatcctaagttctacttacaaggagctacaacaaattggtcataaccggagagcgttcaaggaggtaatatcccatcttactctgtagcaaggctacaaaaggagagctaaagaactaggctacaaaaagagagctaaagaactaactatctagcaagactacagagctatagtgtagagatttcataaccggtgagcgttcaaggatactttgaagagaagaggtaatatctcaactagcaagactacaaaaaaatggagatataaaactaactgtctaacaagactacagagctatagtagagatagatacgttcgacacttaagcatgagaattcgagctcggtaccctggttcacaaactcaatacaacacacagtggagtagggtattacgctccggcggcccgaaccactctaaatccttgtgtcctcgtgtgctcttccaccattaatgactgtaattgcagggacacgaagagttgtagcgcttttgccaacaagatccgctatatgctagtagagtggaacctgcacagcaacaagcatccaataatctgagaataagaattatgtgtggtgatggttctcatctctgcaactcgccattttcgcgagagaaccaaatccaagttggtgaagatcatgatttgggctcatgggctggcatagtagctattacctttgcaattgtggttcgaatctatccgatattctccttttcagggagagctaatgcttatgcttattgggtattttggtttgacactgcttcacgcccaaaaaaaggcaactatgtctgagttggatatggcccaaaaaaaggcagctatgtctgagttggatatggaagtcttctttcgtttagggtgaagtaagaccaagctcatgagcttattatcttaggtcggaacaaattagttgataggcatggcacatttatcaaattataatgattttaacagaaaagcaacacctctttttcagcagcaccagctttgcaagctgcaattgacactccaagcatagtatttgctccaaactcagcctgcatttcgcacaatatcatatctatttccatttggataaaatatattttccagaaatatgggaacagaatcaagatacagaaaaaagttgtggtagtagtggtaagtggaaacacaagtacagtgaaaagatagcattatttctgaacagtcaaattaaccgaaataagtagtatcacatactgcccctaaattgactacacccaatgtaaagaattgcttgagcatattgagccatcagttgtttgtttgtgtaacggatttgacaatgcagagttcaggagcaaaaaaccgcaaaggagagaaagagggaaaggatctcctagtatcccaccttgtggcgcgccctgtcaagtgcatgatggcctggtcgatctgcgtctgctgctgcggttccatcccaacgagtgcctccgacaccttgtcgttgatcacccgcaccgcgtaggcgacccccctggcgaggaacttccgcctctcggaggccccggccgcgtcggcggcggcgccctcgagcgcgcccacgctagccgtagatgctcggtgcacggccttgttggtgtgcaactcgacctcaacggccggtgcgctacgcccgtcaaggatctggcgcgcccgcaccctcgtgatcacggtgggcgcctcccgcctcatgtggccgacgatgaaaagcgccgggttaggggccttggcgcgcaccgccgtattcagggcctcctcgctcttgcgcgagagcaggtgcttccccaggtactcctgcactgacaaggctgccacagcggtggaatttgtcctcacgacttcgccacgtcgtcctcacctccctggcttcccacgactccgccgtatcgaggtgctcggtgggtcgtcttaatccgaagtccgaactaggaagacgagacagagaggtctgaggaatgggcctcgtttgatgttgagctgaattatttttccagcataagcccaggtcttggtccatgaacaaaattactagaaacccagcccagtactacgatctaaaagagggactgccactggatagctctctctagcattctccacgctccaatacagcggcgtcgtgtctatccgggtctatccgcgaacacgtgagaactctccagaaactgctttctcctccacttcatctctctcgctttccctctataaaaagaccccttctaggaattgagggagacagcaagcaccaagcagcgatccgaagctcaatcaattcactcaaacctcttccccaaatcttcgattagatcttcgttgacaagaagactagaaccgaacctgacatgtccaacctgctcacggttcaccagaaccttccggctcttccagtggacgcgacgtccgatgaagtcaggaagaacctcatggacatgttccgcgacaggcaagcgttcagcgagcacacctggaagatgctgctctccgtctgccgctcctgggctgcatggtgcaagctgaacaacaggaagtggttccccgctgagcccgaggacgtgagggattaccttctgtacctgcaagcgcgaggtttgtttctgcttctacctttgatatatatataataattatcattaattagtagtaatataatatttcaaatatttttttcaaaataaaagaatgtagtatatagcaattgcttttctgtagtttataagtgtgtatattttaatttataacttttctaatatatgaccaaaacatggtgatgcctaggtctggcagtgaagaccatccagcaacaccttggacaactgaacatgcttcacaggcgctccggcctcccgcgccccagcgactcgaacgccgtgagcctcgtcatgcgccgcatcaggaaggaaaacgtcgatgccggcgaaagggcaaagcaggccctcgcgttcgagaggaccgatttcgaccaggtccgcagcctgatggagaacagcgacaggtgccaggacattaggaacctggcgttcctcggaattgcatacaacacgctcctcaggatcgcggaaattgcccgcattcgcgtgaaggacattagccgcaccgacggcggcaggatgcttatccacattggcaggaccaagacgctcgtttccaccgcaggcgtcgaaaaggccctcagcctcggagtgaccaagctcgtcgaacgctggatctccgtgtccggcgtcgcggacgacccaaacaactacctcttctgccgcgtccgcaagaacggggtggctgcccctagcgccaccagccaactcagcacgagggccttggaaggtattttcgaggccacccaccgcctgatctacggcgcgaaggatgacagcggtcaacgctacctcgcatggtccgggcactccgcccgcgttggagctgctagggacatggcccgcgccggtgtttccatccccgaaatcatgcaggcgggtggatggacgaacgtgaacattgtcatgaactacattcgcaaccttgacagcgagacgggcgcaatggttcgcctcctggaagatggtgactgaggtacccaacctagacttgtccatcttctggattggccaacttaattaatgtatgaaataaaaggatgcacacatagtgacatgctaatcactataatgtgggcatcaaagttgtgtgttatgtgtaattactagttatctgaataaaagagaaagagatcatccatatttcttatcctaaatgaatgtcacgtgtctttataattctttgatgaaccagatgcatttcattaaccaaatccatatacatataaatattaatcatatataattaatatcaattgggttagcaaaacaaatctagtctaggtgtgttttgcgatccgatatcgaattggccacggtaccagctgctgctgttctagggttcacaagtctgcctatttgtcttccccaatggagctatggttgtctggtctggtccttggtcgtgtcccgtttcattgtgtactatttacctgtaatgtgtatccttaagtctggtttgatggtgtctgaaacgttttgctgtggtagagcagcatggaagaactataatgaataagtgatccctaatcattgtgtccaaattttgcttctgctatacccttttgtgctgtttcttatgttttgcttaaaaatttgatctgacaaacaaatttgtctaaattatgctcttgttctgactgtgtactgtacacatttgtattgctaccggtttggcacatagttttctctttgattgcagatcaaacccttctgattgcagattgcttggctatggctgatgtgctcactgttcttctttagcttgtatattgctgatggtggcttggctacggctgaaaaagttgctgctgcgccgacttggcaactgttgctccagtaatgctttgtcctctcttcctagccgccgacttggcacttggcagctgttgctcctgtaatgcgttgttatctcttatctcttgagatgtactatgattttgaggctgtttgacttgtgccagattgccagtgctgatgctatattatctcaggtttttatgctagtatatgttttactgtgtgctgcctgtgtcgagttacgtaatctattgaaccgctatgcgtgttgatgccctgttgttgcttgccagattgatgcccctgttgcttgcagcttgcaagctgtagtgaaatcctaaaattccaaaccaaatctattctgaacttttgaagatctgtgatgtccggaagaaaagattcaaacagataaacgggactctccagaatctataaaataaatgatcgacaaacgctttgctttggtaggcttcaagcttggtcacccggtccgggcctagaaggccagcttcggccgccccgggcaactttattatacaaagttgatagataaatcagatatctggttcctaaggacccggcggaccgattaaactgattcggtccgacgcgttacctaataacttcgtatagcatacattatacgaagttattagctaactaactagtaagcttaagccatgggtcgacggatccgttaactagcgtggcatttggcaccgccgcacactatgcgagctaggagtgctagtttacagatgaaactatgaaaccaagaaaacacaattgtccgtagctagcgcgtggcgtcgtgtcaagcttcacacagtatcttcgttcttcactataaatcgcgcctgttgttcgtgagacccaccaccgtggataacagtcccctaataataagcgatcaacagcactgctgatggctgaacaccgaggcgccgccgcgcgtaaccatccgccggagcagcccgtcgtgccggcgaacgacgccttccccgaccgcgcccagcagctctgcctcgacgccgggcgcgcgctcgcgatgtgcggcgtgctcgtcgccgtccctcccgcattttacgcgtcgacgtcgcggacgacaccgcacttgccttcgtcggcttcgtcctctggatcatcggtgcgtggctgtgcctcctggcgctcacgcccttggctccacgggcggtgagggcgggcggggccgccgccagcaccttgctgatcaggtgcctgtccctttcatgaactactagcgcccgcgcccgcggccgccgggcacaagagaacacatcgatgttcgctgcgtacgtcagcaataaggcactctttgtcagtagtcgagtgcatatgttgggtgtttgccctgggagatttcaagtgttgtggccattatcccgcaggataaaaaatcggcggcttttggattgatacggaaaataacgatgtttcatgctcgtgttgtgtgtgtgacatcttgtcagccaagtttttaaccgttgctactccccctctgtgggctcagtgtgtggaccggaatacgtcgtacataggccgtagcctaagcccaatatgccgtttttcaggttggcctgtgtgacgacaagcgggtctcaaaagcccatcacgcaactggcctgcaattattggaggagagcgcgtcgagttggttccagaggctgcgtggtggggccggactctgcgacgacctctcgttcgcgtccgatttggttgccgtgagccgtgacgtaacgcctccttccgttcctccctatataagttccacccccgggtccggtttccccaagccccagtgacccccgatcccgatcgcgaaatctccgcacccgccggcaagggaccgaagcaagcctctctcccgaccgtcgcatcaaggtacgcgtccgctcgatctgtcctcttccttctcgatttgacttgctgtggtgcccgatcacgggatcagaatcgcaccagtgtagatttcgcatgttctaagatgtgttagtttccaggctaatccagttctcttgacgcccgatccgatcgagctccgtgtttatttcagcctaatcgtagtattcccctaaaatttcctcattagggggttcgcaagattgttggtcgacaggttcacttatgctcgatcgcttacttttagtcgattcatgctgcgtactattgttgccccccgtggttttatcttttctcgtgtgaaatccagtagatatagtagatatcgtagcattaggttttaattcaatcgattgattattgtatcatcaaaattgagaagttcgaatcatgcctatcatgctgcctcaaccgaaatcctgtatattgaagtttcaattcaattgattgatcattcattagattcaaccaaaatctagaaggttagatgacgcatgtcatgctgcctgcgtagtttacctttgatctgtttatgattaccttatcagtaggatatttgtgattttgggaagtagcactaactgattcatgctgacatgatgttccctttcagattatactgttgagtcctatctaattgatgctttgtatgctatatgaatacgtcatggtaaattagcagttaattagcatattagcaattgggcgtacctcatcaggattgctcttgtagatgtgtgtggtgatgtttcttgttcaattcatgttctgctttaaaagtatgtgttctctgtttgttaattaagattcatggttataatgatttggacctaattaatcagggttgcccttttagatgcgtggttacttgttgagttcatttttttcctgctatagttgtatgcgtttgttcattcatggttagatttgatttgtttcttctctattccatgccttccatatacttcaattgtagcttaacatgagatttctgtatatgcaggtcgaccgccggggatccacacgacaccatggcccagtccaagcacggcctgaccaaggagatgaccatgaagtaccgcatggagggctgcgtggacggccacaagttcgtgatcaccggcgagggcatcggctaccccttcaagggcaagcaggccatcaacctgtgcgtggtggagggcggccccttgcccttcgccgaggacatcttgtccgccgccttcatgtacggcaaccgcgtgttcaccgagtacccccaggacatcgtcgactacttcaagaactcctgccccgccggctacacctgggaccgctccttcctgttcgaggacggcgccgtgtgcatctgcaacgccgacatcaccgtgagcgtggaggagaactgcatgtaccacgagtccaagttctacggcgtgaacttccccgccgacggccccgtgatgaagaagatgaccgacaactgggagccctcctgcgagaagatcatccccgtgcccaagcagggcatcttgaagggcgacgtgagcatgtacctgctgctgaaggacggtggccgcttgcgctgccagttcgacaccgtgtacaaggccaagtccgtgccccgcaagatgcccgactggcacttcatccagcacaagctgacccgcgaggaccgcagcgacgccaagaaccagaagtggcacctgaccgagcacgccatcgcctccggctccgccttgccctccggactcagatctcgatagagtcaacctagacttgtccatcttctggattggccaacttaattaatgtatgaaataaaaggatgcacacatagtgacatgctaatcactataatgtgggcatcaaagttgtgtgttatgtgtaattactagttatctgaataaaagagaaagagatcatccatatttcttatcctaaatgaatgtcacgtgtctttataattctttgatgaaccagatgcatttcattaaccaaatccatatacatataaatattaatcatatataattaatatcaattgggttagcaaaacaaatctagtctaggtgtgttttgcgaattgcggcgcccttactttaacgcctctaaccaacacccctttatctttataaggaacaataaacagaatttgccccactgttctaaatcacctaataatatccccagctaaaaacaataaaggtttcctagaattaagacaagcatgactgttcctccaggagggtttggaacattgttgcagtcttgcagatacgggcgaagggtgagaaacagagcggagggctggaggtgacctcggtagtcgacgccggagttgagcttgacaacgacggggcggcccctgatggacttgaggaagtccgatggcgtcttcaccgtcccgccggcgcccgaggcgggcctgtcgctgccgccgccgccgctgctcatcttgcgcgctgtgcccccggcggtgtccctgtgttgcggatcgcgggtgggccaggtggatgcgagggcgacccgtttggactccggccggagccgccggatccctggtcggtgtcagtgccgtttactctgggccccacgtgtcagtaccgtctgtagatgacaacaacccgtcgtccacagtcatgtccaaaatatcctttcttcttttttttcgattcggatatctatcttccttttttttttccaaaaatcttcttgacgcaccagcgcgcacgtttgtggtaaacgccgacacgtcggtcccacgtcgatagaccccacccaccagtgagtagcgtgtacgtattcgggggtgacggacgtgtcgccgtcgtcttgctagtcccattcccatctgagccacacatctctgaacaaaaaaaaggagggaggcctccacgcacatccccctccgtgccacccgccccaaaccctcgcgccgcctccgagacagccgccgcaaccatggccaccgccgccgccgcgtctaccgcgctcactggcgccactaccgctgcgcccaaggcgaggcgccgggcgcacctcctggccacccgccgcgccctcgccgcgcccatcaggtgctcagcggcgtcacccgccatgccgatggctcccccggccaccccgctccggccgtggggccccaccgagccccgcaagggtgctgacatcctcgtcgagtccctcgagcgctgcggcgtccgcgacgtcttcgcctaccccggcggcgcgtccatggagatccaccaggcactcacccgctcccccgtcatcgccaaccacctcttccgccacgagcaaggggaggcctttgccgcctccggctacgcgcgctcctcgggccgcgtcggcgtctgcatcgccacctccggccccggcgccaccaacctagtctccgcgctcgccgacgcgctgctcgattccgtccccatggtcgccatcacgggacaggtggcgcgacgcatgattggcaccgacgccttccaggagacgcccatcgtcgaggtcacccgctccatcaccaagcacaactacctggtcctcgacgtcgacgacatcccccgcgtcgtgcaggaggctttcttcctcgcctcctctggtcgaccagggccggtgcttgtcgacatccccaaggacatccagcagcagatggcggtgcctgtctgggacaagcccatgagtctgcctgggtacattgcgcgccttcccaagccccctgcgactgagttgcttgagcaggtgctgcgtcttgttggtgaatcgcggcgccctgttctttatgtgggcggtggctgcgcagcatctggtgaggagttgcgacgctttgtggagctgactggaatcccggtcacaactactcttatgggcctcggcaacttccccagcgacgacccactgtctctgcgcatgctaggtatgcatgggacggtgtatgcaaattatgcagtggataaggccgatctgttgcttgcacttggtgtgcggtttgatgatcgcgtgacagggaagattgaggcttttgcaagcagggctaagattgtgcacgttgatattgatccggctgagattggcaagaacaagcagccacatgtgtccatctgtgcagatgttaagcttgctttgcagggcatgaatgctcttcttgaaggaagcacatcaaagaagagctttgactttggctcatggaacgatgagttggatcagcagaagagggaattcccccttgggtataaaacatctaatgaggagatccagccacaatatgctattcaggttcttgatgagctgacgaaaggcgaggccatcatcggcacaggtgttgggcagcaccagatgtgggcggcacagtactacacttacaagcggccaaggcagtggttgtcttcagctggtcttggggctatgggatttggtttgccggctgctgctggtgcttctgtggcaaacccaggtgtcactgttgttgacatcgatggagatggtagctttctcatgaacgttcaggagctagctatgatccgaattgagaacctcccagtgaaggtctttgtgctaaacaaccagcacctggggatggtggtgcagttggaggacaggttctataaggccaacagagcgcacacatacttgggaaacccagagaatgaaagtgagatatatccagatttcgtgacgatcgccaaagggttcaacattccagcggtccgtgtgacaaagaagaacgaagtccgcgcagcgataaagaagatgctcgagactccagggccgtacctcttggatataatcgtcccacaccaggagcatgtgttgcctatgatccctagtggtggggctttcaaggatatgatcctggatggtgatggcaggactgtgtactgactagctagtcagttaacagatctgccagatcctcggtgtacaaataacccgtcttatcctatgagacgggccggcgtcagtgtgttctggaggaatttttatgtcagagcctttttctttgtgtgcttgatgtagatgccaagggaagcttattggctgttgaagcttgatgcaaaataaattatggaactctgttttttgtttatctaataataactagcaaatatgcttccattgcattgaaactaacagccttttgtgtttccaagttttattttgtgacaatgtcatctatttcaattagttgtggaatcggaaacttgcaggactaacttggaaactccaatccctcagcatcctggactttttcctggtgtaatccatgtagatattattttaatcatcattttagttctggaggtttttccatctccggttttgctcccctttcttcaaaaaaaaaaaaaaaatgccgtaggcgccgcaacgcccacctgttgttcaaactcatgggcacgagtggctcgaagattttatacaacaattgctgtagtttcaccgttgctggtgaagaagcatttttttaaaaaaatatagtggtattcattttaattagtttagttgtgcagcgagcaaaatttggacatgctctgctcggaatctgatcgacctagacacagattagcagcagtagctttgtcatctgttccaagagttgcgatctgatagaagaaaaaaaaaccttcccttcaatgtaaaaccgaaactaacaagaaagaagcacagtgccgtttaggcaagtatggagtacgtattaagcatgtagaaggccatgcatgaaccactaacaagaaagaagcgcagtgccattcaggcaagcataagcatgtagattggcatgcatgaacaactaacagtagatcgtctctggtctgattagaagttttttgggaagccaagaaatcatgtacaactggttccatctcaaattccgtggcaaaaagaggcctaagcaacatacctcgagtagatcacattcaagcttggtcacccggtccgtcaatattctgattccgatgacttcgtaggttcctagctcaagccgctcgtgtccaagcgtcacttacgattagctaatgattacggcatctaggaccgactagtggcgcgccgactagctagctaaggtaccgagctcgaattcattccgattaatcgtggcctcttgctcttcaggatgaagagctatgtttaaacgtgcaagcgctactagacaattcagtacattaaaaacgtccgcaatgtgttattaagttgtctaagcgtcaatttgtttacaccacaatatatcctgcca

SEQ ID NO: 274 - DNA, 21308 bp, synthetic construct
  misc_feature 1..21308: note = PHP100058
  source 1..21308: mol_type = other DNA
gtttacccgccaatatatcctgtcaaacactgcggccgcacttgaccgcggatggagccggagctgtggtgaggccatcgacgggaggtgggggagaacacagtctcagtgttctttgtgagtccgcaaggtttttagcttttctgtattaattaaggttgctgttggctgtagaatacggtcgtggaagagctgtatcggtagctactacgtaagctattatatactggaagtctggagctcgtcgatctccggtcgtcttcctccatttctcctcgtcttgctttgactgctgctaccatttgcttctgttttctgatgaagcatgccatgtcggccaccagtgtttgtgtggtttttgcagggaatggctttcaagtgctgtgattgaatggccctcgtcgtcctcggctgagctcacatggacgcgtcatgtgagtgagatatatgatcatatgatgagtggggttcgggtgagtgcgtacttgaagtaggatcccgctttcactcattcattcattggcctttaaaccgggaaattttcgcgaggagatggagggaagcaagcagggtgacgagtgcagagtgccgcgagcgctttgtcaaaaggcaccgccgtaggcaaaaaaatcaatggccctgactgactcgatggtagtactactgtagagactagagagggttgctccccatatcttcgtgtgacttttactccagcattgcatttccgtcattgagacgttaattaatagcagctttcgggacagatgactgtggccatgtttcgtcacggccgcttcgtgccagctgggggtactatagtactgtgattttgttagtaaaaactttcattaggccaccattgacgaccgggccttcgcttttgctgcgctaattaaccatttcccggcgaccgaagggaacatgaacatgccccgacacatgagggcatgaggactagtgttctccctgtcgttcgttgacttgactagtgatagtttaaacgctcttcaactggaagagcggttactaccggttcactagctagctgctaatcgagctagttaccctatgaggtgacatgaagcgctcacggttactatgacggttagcttcacgactgttggtggcagtagcgtacgacttagctatagttccggacttacccttaagataacttcgtatagcatacattatacgaagttatgggcccacgcgtgaagagcggttaccagagctggtcacctttgtccaccaagatggaactgtcttcggccagaatggccatctggattcagcaggcctagaaggccatttatcgctatcaactttgtatagaaaagttgggccgaattcgagctcggtacggccagaatggcccggaccgaagcttgcggccgcacactgatagtttaaactgaaggcgggaaacgacaatctgatcatgagcggagaattaagggagtcacgttatgacccccgccgatgacgcgggacaagccgttttacgtttggaactgacagaaccgcaacgttgaaggagccactcagccgcgggtttctggagtttaatgagctaagcacatacgtcagaaaccattattgcgcgttcaaaagtcgcctaaggtcactatcagctagcaaatatttcttgtcaaaaatgctccactgacgttccataaattcccctcggtatccaattagagtctcatattcactctcccgggggatctcgactctagaggatcgctcaggaaggccgctgagatagaggcatggcggccaatgcgggcggcggtggagcgggaggaggcagcggcagcggcagcgtggctgcgccggcggtgtgccgccccagcggctcgcggtggacgccgacgccggagcagatcaggatgctgaaggagctctactacggctgcggcatccggtcgcccagctcggagcagatccagcgcatcaccgccatgctgcggcagcacggcaagatcgagggcaagaacgtcttctactggttccagaaccacaaggcccgcgagcgccagaagcgccgcctcaccagcctcgacgtcaacgtgcccgccgccggcgcggccgacgccaccaccagccaactcggcgtcctctcgctgtcgtcgccgccgccttcaggcgcggcgcctccctcgcccaccctcggcttctacgccgccggcaatggcggcggatcggctgtgctgctggacacgagttccgactggggcagcagcggcgctgccatggccaccgagacatgcttcctgcaggactacatgggcgtgacggacacgggcagctcgtcgcagtggccacgcttctcgtcgtcggacacgataatggcggcggccgcggcgcgggcggcgacgacgcgggcgcccgagacgctccctctcttcccgacctgcggcgacgacggcggcagcggtagcagcagctacttgccgttctggggtgccgcgtccacaactgccggcgccacttcttccgttgcgatccagcagcaacaccagctgcaggagcagtacagcttttacagcaacagcaacagcacccagctggccggcaccggcaaccaagacgtatcggcaacagcagcagcagccgccgccctggagctgagcctcagctcatggtgctccccttaccctgctgcagggagtatgtgagagcaacgcgagctgccactgctcttcactgatgtctctggaatggaaggaggaggaagtgagcatagcgttggtgcgttgctgtcaagggcgaattcacatggttaacctagacttgtccatcttctggattggccaacttaattaatgtatgaaataaaaggatgcacacatagtgacatgctaatcactataatgtgggcatcaaagttgtgtgttatgtgtaattactagttatctgaataaaagagaaagagatcatccatatttcttatcctaaatgaatgtcacgtgtctttataattctttgatgaaccagatgcatttcattaaccaaatccatatacatataaatattaatcatatataattaatatcaattgggttagcaaaacaaatctagtctaggtgtgttttgcgaatgcggccgccaccgcggtggagctcgaattccggtccgggcctagaaggccagcttcaagtttgtacaaaaaagcaggctccggccagaatggcccggaccgtcactgactagctaaacagcggccgcatcgagcagctggcttgtggggaccagacaaaaaaggaatggtgcagaattgttaggcgcacctaccaaaagcatctttgcctttattgcaaagataaagcagattcctctagtacaagtggggaacaaaataacgtggaaaagagctgtcctgacagcccactcactaatgcgtatgacgaacgcagtgacgaccacaaaactcgagcaacgagatcatgagccaatcaaagaggagtgatgtagacctaaagcaataatggagccatgacgtaagggcttacgcccatacgaaataattaaaggctgatgtgacctgtcggtctctcagaacctttactttttatgtttggcgtgtatttttaaatttccacggcaatgacgatgtgaccgtcgacccactaaaacattgctttgtcaaaagctaaaaaagatgatgcccgacagccacttgtgtgaagcatgagaagccggtccctccactaagaaaattagtgaagcatcttccagtggtccctccactcacagctcaatcagtgagcaacaggacgaaggaaatgacgtaagccatgacgtctaatcccagggcccggtgaccaatcgaattagcttggcgcgtggaccgaagcttgcatgcctgcaggtacccgcacgcgggggtgttccatcgtgtctgccaaaaaccttttgctactgtatgtacggtccaaacgtggtttggtgatgttgcgtcttttcacgaccgtcgtgggccgacagcgtcgtcctaggttcctttcttgccgatccgttcggcaaggacttggtcattcgtcctgtctcgtagacttgctcggcagggacttggtcggtcaccccgtctcgcagacttgctcgtccgggacttggtcgttcgcccctcctcgcatacttgctcgacggggacttggttgctggtcccgtctcgcaaacttgctcgatgaggacttggacatttgctccgccgagtagacttgctcggcggggacttggtcgttcgccccgcatcatagacttgctcgacacagactcagttggtaaatgggccagagaggggtttgtgggggtatcccgttcttgggtacttgacacaattatttgtagtttttacctgttaaaacttcaaatatgatgttcatattcatatctttattggtatcactcttcgtgtatacatttatttatcctatgtacatgcaatgtaaatgatacatagtgcatattgaccttatttttaacatgtacttctttcaaagcaaaccacccgcgaagtgtcacaatgcatacatccttcggtgtcgagggacctcatcatgaggcccctgcccccctaagtctagcttccaatgtcatttaaggaagaagatgagtttcgaggcctttagggcctctgaggttctaccgaacaatctaggttatctttgtctcttagatcccctgcatcagacccctcttggacctcgaccttggagcccttcaaggttctgaagccctcttgagatctatggctcttaatgtgggaacccaagcttctctcttgactaagtacaagaatgctccacattgaggcatacaactagttgtaacccccgggcaagaagtaccatgggagtatggtcccatagccacaactgtctctacttaagacgaccatgtgatactaatgttccgaataaagcttttgcacatcacattaatgtgatggatgatattgtggtcaagcaggcatatggtagccaccacaaaggatatgaagcatacccaaatccactatgaggagtgtgtcgcgtacctatgccacacctaaatgtgctaatttacctgtaagcattataaaatataagcaattacaccgtatctgatggcatggactcgagtacataactatgatatgatatatttctcactgccgcaagatatgcatattacaatgacatgttcaagcgccattgtggtccgcgtagagtcctcgtctctaacaagatgaagtaatcgagcatgttcactacgaaccaacatgtgatcctcctcttcttcgagctataaaatattcatccagcttaaatttcaaaatatgtgtgtcagagttaaaaaaatattcgattcaaatctaaatatcagttctgtattcatatcctagaatattcgaatctatatttgaattcagattacaaggtagtgaattgtgacatgtattcgttcctatccgatccgtcgtttttgagcactaggtgcggtcactgtgacgcgtggacttggcttcgcccactgccatcgtggacccacgtcatcagcaagtgtccatatccaccacccgacccgacgaccgcttgccgtccgatccgtgtgctcccgagggcaaggatggcatttcgccacgcgagatatttttcggtggcctgcacaggccggcagtgcagcggccaaaacgaggtcaggtcagtcacgctgggccccgcctcacgctcccgtcctgctccgggtcccaacaaagccgtccccgggaggtgctcgtgtgctcgtagcgcggtggcgaccccgatgccccgcatattccactgggcgtccgcgccgtcggatgggatcaggacggccgcggcggccccgcgctcggctataaagacgctgcgggggacgcattccctctccgtgctttcttagaggtgggttggcttctcctccccctccggttcgggttcgggttcgtgaggttctccggggttcgggttcgtgggtgagcggatcgagggatccatggccactgtgaacaactggctcgctttctccctctccccgcaggagctgccgccctcccagacgacggactccacactcatctcggccgccaccgccgaccatgtctccggcgatgtctgcttcaacatcccccaagattggagcatgaggggatcagagctttcggcgctcgtcgcggagccgaagctggaggacttcctcggcggcatctccttctccgagcagcatcacaaggccaactgcaacatgatacccagcactagcagcacagtttgctacgcgagctcaggtgctagcaccggctaccatcaccagctgtaccaccagcccaccagctcagcgctccacttcgcggactccgtaatggtggcttcctcggccggtgtccacgacggcggtgccatgctcagcgcggccgccgctaacggtgtcgctggcgctgccagtgccaacggcggcggcatcgggctgtccatgattaagaactggctgcggagccaaccggcgcccatgcagccgagggtggcggcggctgagggcgcgcaggggctctctttgtccatgaacatggcggggacgacccaaggcgctgctggcatgccacttctcgctggagagcgcgcacgggcgcccgagagtgtatcgacgtcagcacagggtggagccgtcgtcgtcacggcgccgaaggaggatagcggtggcagcggtgttgccggcgctctagtagccgtgagcacggacacgggtggcagcggcggcgcgtcggctgacaacacggcaaggaagacggtggacacgttcgggcagcgcacgtcgatttaccgtggcgtgacaaggcatagatggactgggagatatgaggcacatctttgggataacagttgcagaagggaagggcaaactcgtaagggtcgtcaagtctatttaggtggctatgataaagaggagaaagctgctagggcttatgatcttgctgctctgaagtactggggtgccacaacaacaacaaattttccagtgagtaactacgaaaaggagctcgaggacatgaagcacatgacaaggcaggagtttgtagcgtctctgagaaggaagagcagtggtttctccagaggtgcatccatttacaggggagtgactaggcatcaccaacatggaagatggcaagcacggattggacgagttgcagggaacaaggatctttacttgggcaccttcagcacccaggaggaggcagcggaggcgtacgacatcgcggcgatcaagttccgcggcctcaacgccgtcaccaacttcgacatgagccgctacgacgtgaagagcatcctggacagcagcgccctccccatcggcagcgccgccaagcgcctcaaggaggccgaggccgcagcgtccgcgcagcaccaccacgccggcgtggtgagctacgacgtcggccgcatcgcctcgcagctcggcgacggcggagccctggcggcggcgtacggcgcgcactaccacggcgccgcctggccgaccatcgcgttccagccgggcgccgccagcacaggcctgtaccacccgtacgcgcagcagccaatgcgcggcggcgggtggtgcaagcaggagcaggaccacgcggtgatcgcggccgcgcacagcctgcaggacctccaccacctgaacctgggcgcggccggcgcgcacgactttttctcggcagggcagcaggccgccgccgctgcgatgcacggcctgggtagcatcgacagtgcgtcgctcgagcacagcaccggctccaactccgtcgtctacaacggcggggtcggcgacagcaacggcgccagcgccgtcggcggcagtggcggtggctacatgatgccgatgagcgctgccggagcaaccactacatcggcaatggtgagccacgagcaggtgcatgcacgggcctacgacgaagccaagcaggctgctcagatggggtacgagagctacctggtgaacgcggagaacaatggtggcggaaggatgtctgcatgggggactgtcgtgtctgcagccgcggcggcagcagcaagcagcaacgacaacatggccgccgacgtcgggcatggcggcgcgcagctcttcagtgtctggaacgacacttaagcgtacgtgccggcctggctctccgaaagggcgtattccagcacactggcggccgttactagacccaacctagacttgtccatcttctggattggccaacttaattaatgtatgaaataaaaggatgcacacatagtgacatgctaatcactataatgtgggcatcaaagttgtgtgttatgtgtaattactagttatctgaataaaagagaaagagatcatccatatttcttatcctaaatgaatgtcacgtgtctttataattctttgatgaaccagatgcatttcattaaccaaatccatatacatataaatattaatcatatataattaatatcaattgggttagcaaaacaaatctagtctaggtgtgttttgcgaatgcggcctccgggcacccagctttcttgtacaaagtggccgttaacggatcggccagaatggcccggaccgggttaccccgcggttcaaagccaatgactgttgttaggtccagtttctaaggacgaatcatccaatcactggttctttctgaacaaaacaaagagctatagagttacgttactgtagccgagacagagcctgcaatctggttatgccacatactaggttctttcttaaagttgactcactctatcctaagttctacttacaaggagctacaacaaattggtcataaccggagagcgttcaaggaggtaatatcccatcttactctgtagcaaggctacaaaaggagagctaaagaactaggctacaaaaagagagctaaagaactaactatctagcaagactacagagctatagtgtagagatttcataaccggtgagcgttcaaggatactttgaagagaagaggtaatatctcaactagcaagactacaaaaaaatggagatataaaactaactgtctaacaagactacagagctatagtagagatagatacgttcgacacttaagcatgagaattcgagctcggtaccctggttcacaaactcaatacaacacacagtggagtagggtattacgctccggcggcccgaaccactctaaatccttgtgtcctcgtgtgctcttccaccattaatgactgtaattgcagggacacgaagagttgtagcgcttttgccaacaagatccgctatatgctagtagagtggaacctgcacagcaacaagcatccaataatctgagaataagaattatgtgtggtgatggttctcatctctgcaactcgccattttcgcgagagaaccaaatccaagttggtgaagatcatgatttgggctcatgggctggcatagtagctattacctttgcaattgtggttcgaatctatccgatattctccttttcagggagagctaatgcttatgcttattgggtattttggtttgacactgcttcacgcccaaaaaaaggcaactatgtctgagttggatatggcccaaaaaaaggcagctatgtctgagttggatatggaagtcttctttcgtttagggtgaagtaagaccaagctcatgagcttattatcttaggtcggaacaaattagttgataggcatggcacatttatcaaattataatgattttaacagaaaagcaacacctctttttcagcagcaccagctttgcaagctgcaattgacactccaagcatagtatttgctccaaactcagcctgcatttcgcacaatatcatatctatttccatttggataaaatatattttccagaaatatgggaacagaatcaagatacagaaaaaagttgtggtagtagtggtaagtggaaacacaagtacagtgaaaagatagcattatttctgaacagtcaaattaaccgaaataagtagtatcacatactgcccctaaattgactacacccaatgtaaagaattgcttgagcatattgagccatcagttgtttgtttgtgtaacggatttgacaatgcagagttcaggagcaaaaaaccgcaaaggagagaaagagggaaaggatctcctagtatcccaccttgtggcgcgccctgtcaagtgcatgatggcctggtcgatctgcgtctgctgctgcggttccatcccaacgagtgcctccgacaccttgtcgttgatcacccgcaccgcgtaggcgacccccctggcgaggaacttccgcctctcggaggccccggccgcgtcggcggcggcgccctcgagcgcgcccacgctagccgtagatgctcggtgcacggccttgttggtgtgcaactcgacctcaacggccggtgcgctacgcccgtcaaggatctggcgcgcccgcaccctcgtgatcacggtgggcgcctcccgcctcatgtggccgacgatgaaaagcgccgggttaggggccttggcgcgcaccgccgtattcagggcctcctcgctcttgcgcgagagcaggtgcttccccaggtactcctgcactgacaaggctgccacagcggtggaatttgtcctcacgacttcgccacgtcgtcctcacctccctggcttcccacgactccgccgtatcgaggtgctcggtgggtcgtcttaatccgaagtccgaactaggaagacgagacagagaggtctgaggaatgggcctcgtttgatgttgagctgaattatttttccagcataagcccaggtcttggtccatgaacaaaattactagaaacccagcccagtactacgatctaaaagagggactgccactggatagctctctctagcattctccacgctccaatacagcggcgtcgtgtctatccgggtctatccgcgaacacgtgagaactctccagaaactgctttctcctccacttcatctctctcgctttccctctataaaaagaccccttctaggaattgagggagacagcaagcaccaagcagcgatccgaagctcaatcaattcactcaaacctcttccccaaatcttcgattagatcttcgttgacaagaagactagaaccgaacctgacatgtccaacctgctcacggttcaccagaaccttccggctcttccagtggacgcgacgtccgatgaagtcaggaagaacctcatggacatgttccgcgacaggcaagcgttcagcgagcacacctggaagatgctgctctccgtctgccgctcctgggctgcatggtgcaagctgaacaacaggaagtggttccccgctgagcccgaggacgtgagggattaccttctgtacctgcaagcgcgaggtttgtttctgcttctacctttgatatatatataataattatcattaattagtagtaatataatatttcaaatatttttttcaaaataaaagaatgtagtatatagcaattgcttttctgtagtttataagtgtgtatattttaatttataacttttctaatatatgaccaaaacatggtgatgcctaggtctggcagtgaagaccatccagcaacaccttggacaactgaacatgcttcacaggcgctccggcctcccgcgccccagcgactcgaacgccgtgagcctcgtcatgcgccgcatcaggaaggaaaacgtcgatgccggcgaaagggcaaagcaggccctcgcgttcgagaggaccgatttcgaccaggtccgcagcctgatggagaacagcgacaggtgccaggacattaggaacctggcgttcctcggaattgcatacaacacgctcctcaggatcgcggaaattgcccgcattcgcgtgaaggacattagccgcaccgacggcggcaggatgcttatccacattggcaggaccaagacgctcgtttccaccgcaggcgtcgaaaaggccctcagcctcggagtgaccaagctcgtcgaacgctggatctccgtgtccggcgtcgcggacgacccaaacaactacctcttctgccgcgtccgcaagaacggggtggctgcccctagcgccaccagccaactcagcacgagggccttggaaggtattttcgaggccacccaccgcctgatctacggcgcgaaggatgacagcggtcaacgctacctcgcatggtccgggcactccgcccgcgttggagctgctagggacatggcccgcgccggtgtttccatccccgaaatcatgcaggcgggtggatggacgaacgtgaacattgtcatgaactacattcgcaaccttgacagcgagacgggcgcaatggttcgcctcctggaagatggtgactgaggtacccaacctagacttgtccatcttctggattggccaacttaattaatgtatgaaataaaaggatgcacacatagtgacatgctaatcactataatgtgggcatcaaagttgtgtgttatgtgtaattactagttatctgaataaaagagaaagagatcatccatatttcttatcctaaatgaatgtcacgtgtctttataattctttgatgaaccagatgcatttcattaaccaaatccatatacatataaatattaatcatatataattaatatcaattgggttagcaaaacaaatctagtctaggtgtgttttgcgatccgatatcgaattggccacggtaccagctgctgctgttctagggttcacaagtctgcctatttgtcttccccaatggagctatggttgtctggtctggtccttggtcgtgtcccgtttcattgtgtactatttacctgtaatgtgtatccttaagtctggtttgatggtgtctgaaacgttttgctgtggtagagcagcatggaagaactataatgaataagtgatccctaatcattgtgtccaaattttgcttctgctatacccttttgtgctgtttcttatgttttgcttaaaaatttgatctgacaaacaaatttgtctaaattatgctcttgttctgactgtgtactgtacacatttgtattgctaccggtttggcacatagttttctctttgattgcagatcaaacccttctgattgcagattgcttggctatggctgatgtgctcactgttcttctttagcttgtatattgctgatggtggcttggctacggctgaaaaagttgctgctgcgccgacttggcaactgttgctccagtaatgctttgtcctctcttcctagccgccgacttggcacttggcagctgttgctcctgtaatgcgttgttatctcttatctcttgagatgtactatgattttgaggctgtttgacttgtgccagattgccagtgctgatgctatattatctcaggtttttatgctagtatatgttttactgtgtgctgcctgtgtcgagttacgtaatctattgaaccgctatgcgtgttgatgccctgttgttgcttgccagattgatgcccctgttgcttgcagcttgcaagctgtagtgaaatcctaaaattccaaaccaaatctattctgaacttttgaagatctgtgatgtccggaagaaaagattcaaacagataaacgggactctccagaatctataaaataaatgatcgacaaacgctttgctttggtaggcttcaagcttggtcacccggtccgggcctagaaggccagcttcggccgccccgggcaactttattatacaaagttgatagataaatcagatatctggttcctaaggacccggcggaccgattaaactgattcggtccgacgcgttacctaataacttcgtatagcatacattatacgaagttattagctaactaactagtaagcttaagccatgggtcgacggatccgttaactagcgtggcatttggcaccgccgcacactatgcgagctaggagtgctagtttacagatgaaactatgaaaccaagaaaacacaattgtccgtagctagcgcgtggcgtcgtgtcaagcttcacacagtatcttcgttcttcactataaatcgcgcctgttgttcgtgagacccaccaccgtggataacagtcccctaataataagcgatcaacagcactgctgatggctgaacaccgaggcgccgccgcgcgtaaccatccgccggagcagcccgtcgtgccggcgaacgacgccttccccgaccgcgcccagcagctctgcctcgacgccgggcgcgcgctcgcgatgtgcggcgtgctcgtcgccgtccctcccgcattttacgcgtcgacgtcgcggacgacaccgcacttgccttcgtcggcttcgtcctctggatcatcggtgcgtggctgtgcctcctggcgctcacgcccttggctccacgggcggtgagggcgggcggggccgccgccagcaccttgctgatcaggtgcctgtccctttcatgaactactagcgcccgcgcccgcggccgccgggcacaagagaacacatcgatgttcgctgcgtacgtcagcaataaggcactctttgtcagtagtcgagtgcatatgttgggtgtttgccctgggagatttcaagtgttgtggccattatcccgcaggataaaaaatcggcggcttttggattgatacggaaaataacgatgtttcatgctcgtgttgtgtgtgtgacatcttgtcagccaagtttttaaccgttgctactccccctctgtgggctcagtgtgtggaccggaatacgtcgtacataggccgtagcctaagcccaatatgccgtttttcaggttggcctgtgtgacgacaagcgggtctcaaaagcccatcacgcaactggcctgcaattattggaggagagcgcgtcgagttggttccagaggctgcgtggtggggccggactctgcgacgacctctcgttcgcgtccgatttggttgccgtgagccgtgacgtaacgcctccttccgttcctccctatataagttccacccccgggtccggtttccccaagccccagtgacccccgatcccgatcgcgaaatctccgcacccgccggcaagggaccgaagcaagcctctctcccgaccgtcgcatcaaggtacgcgtccgctcgatctgtcctcttccttctcgatttgacttgctgtggtgcccgatcacgggatcagaatcgcaccagtgtagatttcgcatgttctaagatgtgttagtttccaggctaatccagttctcttgacgcccgatccgatcgagctccgtgtttatttcagcctaatcgtagtattcccctaaaatttcctcattagggggttcgcaagattgttggtcgacaggttcacttatgctcgatcgcttacttttagtcgattcatgctgcgtactattgttgccccccgtggttttatcttttctcgtgtgaaatccagtagatatagtagatatcgtagcattaggttttaattcaatcgattgattattgtatcatcaaaattgagaagttcgaatcatgcctatcatgctgcctcaaccgaaatcctgtatattgaagtttcaattcaattgattgatcattcattagattcaaccaaaatctagaaggttagatgacgcatgtcatgctgcctgcgtagtttacctttgatctgtttatgattaccttatcagtaggatatttgtgattttgggaagtagcactaactgattcatgctgacatgatgttccctttcagattatactgttgagtcctatctaattgatgctttgtatgctatatgaatacgtcatggtaaattagcagttaattagcatattagcaattgggcgtacctcatcaggattgctcttgtagatgtgtgtggtgatgtttcttgttcaattcatgttctgctttaaaagtatgtgttctctgtttgttaattaagattcatggttataatgatttggacctaattaatcagggttgcccttttagatgcgtggttacttgttgagttcatttttttcctgctatagttgtatgcgtttgttcattcatggttagatttgatttgtttcttctctattccatgccttccatatacttcaattgtagcttaacatgagatttctgtatatgcaggtcgaccgccggggatccacacgacaccatggcccagtccaagcacggcctgaccaaggagatgaccatgaagtaccgcatggagggctgcgtggacggccacaagttcgtgatcaccggcgagggcatcggctaccccttcaagggcaagcaggccatcaacctgtgcgtggtggagggcggccccttgcccttcgccgaggacatcttgtccgccgccttcatgtacggcaaccgcgtgttcaccgagtacccccaggacatcgtcgactacttcaagaactcctgccccgccggctacacctgggaccgctccttcctgttcgaggacggcgccgtgtgcatctgcaacgccgacatcaccgtgagcgtggaggagaactgcatgtaccacgagtccaagttctacggcgtgaacttccccgccgacggccccgtgatgaagaagatgaccgacaactgggagccctcctgcgagaagatcatccccgtgcccaagcagggcatcttgaagggcgacgtgagcatgtacctgctgctgaaggacggtggccgcttgcgctgccagttcgacaccgtgtacaaggccaagtccgtgccccgcaagatgcccgactggcacttcatccagcacaagctgacccgcgaggaccgcagcgacgccaagaaccagaagtggcacctgaccgagcacgccatcgcctccggctccgccttgccctccggactcagatctcgatagagtcaacctagacttgtccatcttctggattggccaacttaattaatgtatgaaataaaaggatgcacacatagtgacatgctaatcactataatgtgggcatcaaagttgtgtgttatgtgtaattactagttatctgaataaaagagaaagagatcatccatatttcttatcctaaatgaatgtcacgtgtctttataattctttgatgaaccagatgcatttcattaaccaaatccatatacatataaatattaatcatatataattaatatcaattgggttagcaaaacaaatctagtctaggtgtgttttgcgaattgcggcgcccttactttaacgcctctaaccaacacccctttatctttataaggaacaataaacagaatttgccccactgttctaaatcacctaataatatccccagctaaaaacaataaaggtttcctagaattaagacaagcatgactgttcctccaggagggtttggaacattgttgcagtcttgcagatacgggcgaagggtgagaaacagagcggagggctggaggtgacctcggtagtcgacgccggagttgagcttgacaacgacggggcggcccctgatggacttgaggaagtccgatggcgtcttcaccgtcccgccggcgcccgaggcgggcctgtcgctgccgccgccgccgctgctcatcttgcgcgctgtgcccccggcggtgtccctgtgttgcggatcgcgggtgggccaggtggatgcgagggcgacccgtttggactccggccggagccgccggatccctggtcggtgtcagtgccgtttactctgggccccacgtgtcagtaccgtctgtagatgacaacaacccgtcgtccacagtcatgtccaaaatatcctttcttcttttttttcgattcggatatctatcttccttttttttttccaaaaatcttcttgacgcaccagcgcgcacgtttgtggtaaacgccgacacgtcggtcccacgtcgatagaccccacccaccagtgagtagcgtgtacgtattcgggggtgacggacgtgtcgccgtcgtcttgctagtcccattcccatctgagccacacatctctgaacaaaaaaaaggagggaggcctccacgcacatccccctccgtgccacccgccccaaaccctcgcgccgcctccgagacagccgccgcaaccatggccaccgccgccgccgcgtctaccgcgctcactggcgccactaccgctgcgcccaaggcgaggcgccgggcgcacctcctggccacccgccgcgccctcgccgcgcccatcaggtgctcagcggcgtcacccgccatgccgatggctcccccggccaccccgctccggccgtggggccccaccgagccccgcaagggtgctgacatcctcgtcgagtccctcgagcgctgcggcgtccgcgacgtcttcgcctaccccggcggcgcgtccatggagatccaccaggcactcacccgctcccccgtcatcgccaaccacctcttccgccacgagcaaggggaggcctttgccgcctccggctacgcgcgctcctcgggccgcgtcggcgtctgcatcgccacctccggccccggcgccaccaacctagtctccgcgctcgccgacgcgctgctcgattccgtccccatggtcgccatcacgggacaggtggcgcgacgcatgattggcaccgacgccttccaggagacgcccatcgtcgaggtcacccgctccatcaccaagcacaactacctggtcctcgacgtcgacgacatcccccgcgtcgtgcaggaggctttcttcctcgcctcctctggtcgaccagggccggtgcttgtcgacatccccaaggacatccagcagcagatggcggtgcctgtctgggacaagcccatgagtctgcctgggtacattgcgcgccttcccaagccccctgcgactgagttgcttgagcaggtgctgcgtcttgttggtgaatcgcggcgccctgttctttatgtgggcggtggctgcgcagcatctggtgaggagttgcgacgctttgtggagctgactggaatcccggtcacaactactcttatgggcctcggcaacttccccagcgacgacccactgtctctgcgcatgctaggtatgcatgggacggtgtatgcaaattatgcagtggataaggccgatctgttgcttgcacttggtgtgcggtttgatgatcgcgtgacagggaagattgaggcttttgcaagcagggctaagattgtgcacgttgatattgatccggctgagattggcaagaacaagcagccacatgtgtccatctgtgcagatgttaagcttgctttgcagggcatgaatgctcttcttgaaggaagcacatcaaagaagagctttgactttggctcatggaacgatgagttggatcagcagaagagggaattcccccttgggtataaaacatctaatgaggagatccagccacaatatgctattcaggttcttgatgagctgacgaaaggcgaggccatcatcggcacaggtgttgggcagcaccagatgtgggcggcacagtactacacttacaagcggccaaggcagtggttgtcttcagctggtcttggggctatgggatttggtttgccggctgctgctggtgcttctgtggcaaacccaggtgtcactgttgttgacatcgatggagatggtagctttctcatgaacgttcaggagctagctatgatccgaattgagaacctcccagtgaaggtctttgtgctaaacaaccagcacctggggatggtggtgcagttggaggacaggttctataaggccaacagagcgcacacatacttgggaaacccagagaatgaaagtgagatatatccagatttcgtgacgatcgccaaagggttcaacattccagcggtccgtgtgacaaagaagaacgaagtccgcgcagcgataaagaagatgctcgagactccagggccgtacctcttggatataatcgtcccacaccaggagcatgtgttgcctatgatccctagtggtggggctttcaaggatatgatcctggatggtgatggcaggactgtgtactgactagctagtcagttaacagatctgccagatcctcggtgtacaaataacccgtcttatcctatgagacgggccggcgtcagtgtgttctggaggaatttttatgtcagagcctttttctttgtgtgcttgatgtagatgccaagggaagcttattggctgttgaagcttgatgcaaaataaattatggaactctgttttttgtttatctaataataactagcaaatatgcttccattgcattgaaactaacagccttttgtgtttccaagttttattttgtgacaatgtcatctatttcaattagttgtggaatcggaaacttgcaggactaacttggaaactccaatccctcagcatcctggactttttcctggtgtaatccatgtagatattattttaatcatcattttagttctggaggtttttccatctccggttttgctcccctttcttcaaaaaaaaaaaaaaaatgccgtaggcgccgcaacgcccacctgttgttcaaactcatgggcacgagtggctcgaagattttatacaacaattgctgtagtttcaccgttgctggtgaagaagcatttttttaaaaaaatatagtggtattcattttaattagtttagttgtgcagcgagcaaaatttggacatgctctgctcggaatctgatcgacctagacacagattagcagcagtagctttgtcatctgttccaagagttgcgatctgatagaagaaaaaaaaaccttcccttcaatgtaaaaccgaaactaacaagaaagaagcacagtgccgtttaggcaagtatggagtacgtattaagcatgtagaaggccatgcatgaaccactaacaagaaagaagcgcagtgccattcaggcaagcataagcatgtagattggcatgcatgaacaactaacagtagatcgtctctggtctgattagaagttttttgggaagccaagaaatcatgtacaactggttccatctcaaattccgtggcaaaaagaggcctaagcaacatacctcgagtagatcacattcaagcttggtcacccggtccgtcaatattctgattccgatgacttcgtaggttcctagctcaagccgctcgtgtccaagcgtcacttacgattagctaatgattacggcatctaggaccgactagtggcgcgccgactagctagctaaggtaccgagctcgaattcattccgattaatcgtggcctcttgctcttcaggatgaagagctatgtttaaacgtgcaagcgctactagacaattcagtacattaaaaacgtccgcaatgtgttattaagttgtctaagcgtcaatttgtttacaccacaatatatcctgcca

SEQ ID NO: 275 - DNA, 20683 bp, synthetic construct
  misc_feature 1..20683: note = PHP98229
  source 1..20683: mol_type = other DNA
gtttacccgccaatatatcctgtcaaacactgcggccgcacttgaccgcggatggagccggagctgtggtgaggccatcgacgggaggtgggggagaacacagtctcagtgttctttgtgagtccgcaaggtttttagcttttctgtattaattaaggttgctgttggctgtagaatacggtcgtggaagagctgtatcggtagctactacgtaagctattatatactggaagtctggagctcgtcgatctccggtcgtcttcctccatttctcctcgtcttgctttgactgctgctaccatttgcttctgttttctgatgaagcatgccatgtcggccaccagtgtttgtgtggtttttgcagggaatggctttcaagtgctgtgattgaatggccctcgtcgtcctcggctgagctcacatggacgcgtcatgtgagtgagatatatgatcatatgatgagtggggttcgggtgagtgcgtacttgaagtaggatcccgctttcactcattcattcattggcctttaaaccgggaaattttcgcgaggagatggagggaagcaagcagggtgacgagtgcagagtgccgcgagcgctttgtcaaaaggcaccgccgtaggcaaaaaaatcaatggccctgactgactcgatggtagtactactgtagagactagagagggttgctccccatatcttcgtgtgacttttactccagcattgcatttccgtcattgagacgttaattaatagcagctttcgggacagatgactgtggccatgtttcgtcacggccgcttcgtgccagctgggggtactatagtactgtgattttgttagtaaaaactttcattaggccaccattgacgaccgggccttcgcttttgctgcgctaattaaccatttcccggcgaccgaagggaacatgaacatgccccgacacatgagggcatgaggactagtgttctccctgtcgttcgttgacttgactagtgatagtttaaacgctcttcaactggaagagcggttactaccggttcactagctagctgctaatcgagctagttaccctatgaggtgacatgaagcgctcacggttactatgacggttagcttcacgactgttggtggcagtagcgtacgacttagctatagttccggacttacctagctaataacttcgtatagcatacattatacgaagttatggttaccgagctgttaccaagcggccgcacactgatagtttaaactgaaggcgggaaacgacaatctgatcatgagcggagaattaagggagtcacgttatgacccccgccgatgacgcgggacaagccgttttacgtttggaactgacagaaccgcaacgattgaaggagccactcagccgcgggtttctggagtttaatgagctaagcacatacgtcagaaaccattattgcgcgttcaaaagtcgcctaaggtcactatcagctagcaaatatttcttgtcaaaaatgctccactgacgttccataaattcccctcggtatccaattagagtctcatattcactcccatggcggccaatgcgggcggcggtggagcgggaggaggcagcggcagcggcagcgtggctgcgccggcggtgtgccgccccagcggctcgcggtggacgccgacgccggagcagatcaggatgctgaaggagctctactacggctgcggcatccggtcgcccagctcggagcagatccagcgcatcaccgccatgctgcggcagcacggcaagatcgagggcaagaacgtcttctactggttccagaaccacaaggcccgcgagcgccagaagcgccgcctcaccagcctcgacgtcaacgtgcccgccgccggcgcggccgacgccaccaccagccaactcggcgtcctctcgctgtcgtcgccgccgccttcaggcgcggcgcctccctcgcccaccctcggcttctacgccgccggcaatggcggcggatcggctgtgctgctggacacgagttccgactggggcagcagcggcgctgctatggccaccgagacatgcttcctgcaggactacatgggcgtgacggacacgggcagctcgtcgcagtggccacgcttctcgtcgtcggacacgataatggcggcggccgcggcgcgggcggcgacgacgcgggcgcccgagacgctccctctcttcccgacctgcggcgacgacggcggcagcggtagcagcagctacttgccgttctggggtgccgcgtccacaactgccggcgccacttcttccgttgcgatccaacagcaacaccagctgcaggagcagtacagcttttacagcaacagcaacagcacccagctggccggcaccggcaaccaagacgtatcggcaacagcagcagcagccgccgccctggagctgagcctcagctcatggtgctccccttaccctgctgcagggagtatgtgagagcaacgcgagctgccactgctcttcactgatgtctctggaatggaaggaggaggaagtgagaacagatcattcgacaaagcagcattagtccgttgatcggtggaagaccactcgtcagtgttgagttgaatgtttgatcaataaaatacggcaatgctgtaagggttgttttttatgccattgataatacactgtactgttcagttgttgaactctatttcttagccatgccaagtgcttttcttattttgaataacattacagcaaaaagttgaaagacaaaaaaaaaaacccccgaacagagtgctttgggtcccaagcttctttagactgtgttcggcgttccccctaaatttctccccctatatctcactcacttgtcacatcagcgttctctttccccctatatctccacgctctacagcagttccacctatatcaaacctctataccccaccacaacaatattatatactttcatcttcaactaactcatgtaccttccaatttttttctactaataattatttacgtgcacagaaacttagcaaggagagagagagcgggaatttaaatgctcggcgttaggcttttagtccgctaggtggctagaccgaggttaggacgctagttcactaggggcctagtggtgttttaagacgtcacggtcaccaccttgctagttggatattacctcttctcttcaaagtatccttgaacgctcaccggttatcaaatctctacactatagctctgtagtcttgctagatagttagttctttagctctccgcgaccgaagcttgcatgggccgcatcgagcagctggcttgtggggaccagacaaaaaaggaatggtgcagaattgttaggcgcacctaccaaaagcatctttgcctttattgcaaagataaagcagattcctctagtacaagtggggaacaaaataacgtggaaaagagctgtcctgacagcccactcactaatgcgtatgacgaacgcagtgacgaccacaaaactcgagcaacgagatcatgagccaatcaaagaggagtgatgtagacctaaagcaataatggagccatgacgtaagggcttacgcccatacgaaataattaaaggctgatgtgacctgtcggtctctcagaacctttactttttatgtttggcgtgtatttttaaatttccacggcaatgacgatgtgaccgtcgacccactaaaacattgctttgtcaaaagctaaaaaagatgatgcccgacagccacttgtgtgaagcatgagaagccggtccctccactaagaaaattagtgaagcatcttccagtggtccctccactcacagctcaatcagtgagcaacaggacgaaggaaatgacgtaagccatgacgtctaatcccagggccagcttgcatgcctgcagtgcagcgtgacccggtcgtgcccctctctagagataatgagcattgcatgtctaagttataaaaaattaccacatattttttttgtcacacttgtttgaagtgcagtttatctatctttatacatatatttaaactttactctacgaataatataatctatagtactacaataatatcagtgttttagagaatcatataaatgaacagttagacatggtctaaaggacaattgagtattttgacaacaggactctacagttttatctttttagtgtgcatgtgttctcctttttttttgcaaatagcttcacctatataatacttcatccattttattagtacatccatttagggtttagggttaatggtttttatagactaatttttttagtacatctattttattctattttagcctctaaattaagaaaactaaaactctattttagtttttttatttaataatttagatataaaatagaataaaataaagtgactaaaaattaaacaaataccctttaagaaattaaaaaaactaaggaaacatttttcttgtttcgagtagataatgccagcctgttaaacgccgtcgacgagtctaacggacaccaaccagcgaaccagcagcgtcgcgtcgggccaagcgaagcagacggcacggcatctctgtcgctgcctctggacccctctcgagagttccgctccaccgttggacttgctccgctgtcggcatccagaaattgcgtggcggagcggcagacgtgagccggcacggcaggcggcctcctcctcctctcacggcaccggcagctacgggggattcctttcccaccgctccttcgctttcccttcctcgcccgccgtaataaatagacaccccctccacaccctctttccccaacctcgtgttgttcggagcgcacacacacacaaccagatctcccccaaatccacccgtcggcacctccgcttcaaggtacgccgctcgtcctcccccccccccctctctaccttctctagatcggcgttccggtccatgcatggttagggcccggtagttctacttctgttcatgtttgtgttagatccgtgtttgtgttagatccgtgctgctagcgttcgtacacggatgcgacctgtacgtcagacacgttctgattgctaacttgccagtgtttctctttggggaatcctgggatggctctagccgttccgcagacgggatcgatttcatgattttttttgtttcgttgcatagggtttggtttgcccttttcctttatttcaatatatgccgtgcacttgtttgtcgggtcatcttttcatgcttttttttgtcttggttgtgatgatgtggtctggttgggcggtcgttctagatcggagtagaattctgtttcaaactacctggtggatttattaattttggatctgtatgtgtgtgccatacatattcatagttacgaattgaagatgatggatggaaatatcgatctaggataggtatacatgttgatgcgggttttactgatgcatatacagagatgctttttgttcgcttggttgtgatgatgtggtgtggttgggcggtcgttcattcgttctagatcggagtagaatactgtttcaaactacctggtgtatttattaattttggaactgtatgtgtgtgtcatacatcttcatagttacgagtttaagatggatggaaatatcgatctaggataggtatacatgttgatgtgggttttactgatgcatatacatgatggcatatgcagcatctattcatatgctctaaccttgagtacctatctattataataaacaagtatgttttataattattttgatcttgatatacttggatgatggcatatgcagcagctatatgtggatttttttagccctgccttcatacgctatttatttgcttggtactgtttcttttgtcgatgctcaccctgttgtttggtgttacttctgcaggtcgactttaacttagcctaggatccatggccactgtgaacaactggctcgctttctccctctccccgcaggagctgccgccctcccagacgacggactccacactcatctcggccgccaccgccgaccatgtctccggcgatgtctgcttcaacatcccccaagattggagcatgaggggatcagagctttcggcgctcgtcgcggagccgaagctggaggacttcctcggcggcatctccttctccgagcagcatcacaaggccaactgcaacatgatacccagcactagcagcacagtttgctacgcgagctcaggtgctagcaccggctaccatcaccagctgtaccaccagcccaccagctcagcgctccacttcgcggactccgtaatggtggcttcctcggccggtgtccacgacggcggtgccatgctcagcgcggccgccgctaacggtgtcgctggcgctgccagtgccaacggcggcggcatcgggctgtccatgattaagaactggctgcggagccaaccggcgcccatgcagccgagggtggcggcggctgagggcgcgcaggggctctctttgtccatgaacatggcggggacgacccaaggcgctgctggcatgccacttctcgctggagagcgcgcacgggcgcccgagagtgtatcgacgtcagcacagggtggagccgtcgtcgtcacggcgccgaaggaggatagcggtggcagcggtgttgccggcgctctagtagccgtgagcacggacacgggtggcagcggcggcgcgtcggctgacaacacggcaaggaagacggtggacacgttcgggcagcgcacgtcgatttaccgtggcgtgacaaggcatagatggactgggagatatgaggcacatctttgggataacagttgcagaagggaagggcaaactcgtaagggtcgtcaagtctatttaggtggctatgataaagaggagaaagctgctagggcttatgatcttgctgctctgaagtactggggtgccacaacaacaacaaattttccagtgagtaactacgaaaaggagctcgaggacatgaagcacatgacaaggcaggagtttgtagcgtctctgagaaggaagagcagtggtttctccagaggtgcatccatttacaggggagtgactaggcatcaccaacatggaagatggcaagcacggattggacgagttgcagggaacaaggatctttacttgggcaccttcagcacccaggaggaggcagcggaggcgtacgacatcgcggcgatcaagttccgcggcctcaacgccgtcaccaacttcgacatgagccgctacgacgtgaagagcatcctggacagcagcgccctccccatcggcagcgccgccaagcgcctcaaggaggccgaggccgcagcgtccgcgcagcaccaccacgccggcgtggtgagctacgacgtcggccgcatcgcctcgcagctcggcgacggcggagccctggcggcggcgtacggcgcgcactaccacggcgccgcctggccgaccatcgcgttccagccgggcgccgccagcacaggcctgtaccacccgtacgcgcagcagccaatgcgcggcggcgggtggtgcaagcaggagcaggaccacgcggtgatcgcggccgcgcacagcctgcaggacctccaccacctgaacctgggcgcggccggcgcgcacgactttttctcggcagggcagcaggccgccgccgctgcgatgcacggcctgggtagcatcgacagtgcgtcgctcgagcacagcaccggctccaactccgtcgtctacaacggcggggtcggcgacagcaacggcgccagcgccgtcggcggcagtggcggtggctacatgatgccgatgagcgctgccggagcaaccactacatcggcaatggtgagccacgagcaggtgcatgcacgggcctacgacgaagccaagcaggctgctcagatggggtacgagagctacctggtgaacgcggagaacaatggtggcggaaggatgtctgcatgggggactgtcgtgtctgcagccgcggcggcagcagcaagcagcaacgacaacatggccgccgacgtcgggcatggcggcgcgcagctcttcagtgtctggaacgacacttaagcgtacctagtggtacctgacatcttatagtctgcaacctctcgtgtctgaattcctatctttatcaagtgttattgcttccacgactataggacagctttcgtcgaaagcttttgctcatgtgatctcgaaggattcatctagtctgatttttcgtgacttgtatcggttttattggattcatccaacatatatcaataaaaaatgagttgtgtttcctttcttcctagttcagttaaaattatttccctcctgcgcttgtgctgtaattgtctgtgtacctgttgtttgtgactgtgttagttcccttggatatgatttcgtatttgatatgtacatggagatagcttagcttcattattggagtatgaagttagtatgacatagtcactctcctggaaaattgacactgcaaaccatatttttattctgaaccacaaatcctagtcagtccgctggcatatgccgtccgtttgctgaatccagaacgtgggtttggagatgtacggctgagatgcctctatgcgaaggggatttcgtggtgaaacgagatgggagtagagcaacgcccgtggaagatgcttcaaacttccacacttttgagcaacgatcggcagtagtaaggtagacgatttcaagatcaaagcatatgaagataaacaacatcaacaacaaaatttgttggggttctatagagagaaacagagctacatacatacactgttttgtatctaccatctgagatgatgaaaagatgaaaaactaaagaatgccccggcgccaacgccaggacacgccgcgcgcgcgtcacccgagccatctcttgacccagccggcgctgtatatttacacacgttgcagcatcgatcaccacctgttcgatcgcgtcgccgtcaccggcgcgccgcgacttattgaactagtctagggcgcggctaacaacctagcttagattgccttgtctaaacccttaggctaacgcgccactctagaaggccgatctcccccgaacgcgccagatccgatatcgatgggccctggccgaagcttggtcacccgcaccttgctagttggatattacctcttctcttcaaagtatccttgaacgctcaccggttatcaaatctctacactatagctctgtagtcttgctagatagttagttctttagctctctctagaggttcacaaactcaatacaacacacagtggagtagggtattacgctccggcggcccgaaccactctaaatccttgtgtcctcgtgtgctcttccaccattaatgactgtaattgcagggacacgaagagttgtagcgcttttgccaacaagatccgctatatgctagtagagtggaacctgcacagcaacaagcatccaataatctgagaataagaattatgtgtggtgatggttctcatctctgcaactcgccattttcgcgagagaaccaaatccaagttggtgaagatcatgatttgggctcatgggctggcatagtagctattacctttgcaattgtggttcgaatctatccgatattctccttttcagggagagctaatgcttatgcttattgggtattttggtttgacactgcttcacgcccaaaaaaaggcaactatgtctgagttggatatggcccaaaaaaaggcagctatgtctgagttggatatggaagtcttctttcgtttagggtgaagtaagaccaagctcatgagcttattatcttaggtcggaacaaattagttgataggcatggcacatttatcaaattataatgattttaacagaaaagcaacacctctttttcagcagcaccagctttgcaagctgcaattgacactccaagcatagtatttgctccaaactcagcctgcatttcgcacaatatcatatctatttccatttggataaaatatattttccagaaatatgggaacagaatcaagatacagaaaaaagttgtggtagtagtggtaagtggaaacacaagtacagtgaaaagatagcattatttctgaacagtcaaattaaccgaaataagtagtatcacatactgcccctaaattgactacacccaatgtaaagaattgcttgagcatattgagccatcagttgtttgtttgtgtaacggatttgacaatgcagagttcaggagcaaaaaaccgcaaaggagagaaagagggaaaggatctcctagtatcccaccttgtggcgcgccctgtcaagtgcatgatggcctggtcgatctgcgtctgctgctgcggttccatcccaacgagtgcctccgacaccttgtcgttgatcacccgcaccgcgtaggcgacccccctggcgaggaacttccgcctctcggaggccccggccgcgtcggcggcggcgccctcgagcgcgcccacgctagccgtagatgctcggtgcacggccttgttggtgtgcaactcgacctcaacggccggtgcgctacgcccgtcaaggatctggcgcgcccgcaccctcgtgatcacggtgggcgcctcccgcctcatgtggccgacgatgaaaagcgccgggttaggggccttggcgcgcaccgccgtattcagggcctcctcgctcttgcgcgagagcaggtgcttccccaggtactcctgcactgacaaggctgccacagcggtggaatttgtcctcacgacttcgccacgtcgtcctcacctccctggcttcccacgactccgccgtatcgaggtgctcggtgggtcgtcttaatccgaagtccgaactaggaagacgagacagagaggtctgaggaatgggcctcgtttgatgttgagctgaattatttttccagcataagcccaggtcttggtccatgaacaaaattactagaaacccagcccagtactacgatctaaaagagggactgccactggatagctctctctagcattctccacgctccaatacagcggcgtcgtgtctatccgggtctatccgcgaacacgtgagaactctccagaaactgctttctcctccacttcatctctctcgctttccctctataaaaagaccccttctaggaattgagggagacagcaagcaccaagcagcgatccgaagctcaatcaattcactcaaacctcttccccaaatcttcgattagatcttcgttgacaagaagactagaaccgaacctgacatgtccaacctgctcacggttcaccagaaccttccggctcttccagtggacgcgacgtccgatgaagtcaggaagaacctcatggacatgttccgcgacaggcaagcgttcagcgagcacacctggaagatgctgctctccgtctgccgctcctgggctgcatggtgcaagctgaacaacaggaagtggttccccgctgagcccgaggacgtgagggattaccttctgtacctgcaagcgcgaggtttgtttctgcttctacctttgatatatatataataattatcattaattagtagtaatataatatttcaaatatttttttcaaaataaaagaatgtagtatatagcaattgcttttctgtagtttataagtgtgtatattttaatttataacttttctaatatatgaccaaaacatggtgatgcctaggtctggcagtgaagaccatccagcaacaccttggacaactgaacatgcttcacaggcgctccggcctcccgcgccccagcgactcgaacgccgtgagcctcgtcatgcgccgcatcaggaaggaaaacgtcgatgccggcgaaagggcaaagcaggccctcgcgttcgagaggaccgatttcgaccaggtccgcagcctgatggagaacagcgacaggtgccaggacattaggaacctggcgttcctcggaattgcatacaacacgctcctcaggatcgcggaaattgcccgcattcgcgtgaaggacattagccgcaccgacggcggcaggatgcttatccacattggcaggaccaagacgctcgtttccaccgcaggcgtcgaaaaggccctcagcctcggagtgaccaagctcgtcgaacgctggatctccgtgtccggcgtcgcggacgacccaaacaactacctcttctgccgcgtccgcaagaacggggtggctgcccctagcgccaccagccaactcagcacgagggccttggaaggtattttcgaggccacccaccgcctgatctacggcgcgaaggatgacagcggtcaacgctacctcgcatggtccgggcactccgcccgcgttggagctgctagggacatggcccgcgccggtgtttccatccccgaaatcatgcaggcgggtggatggacgaacgtgaacattgtcatgaactacattcgcaaccttgacagcgagacgggcgcaatggttcgcctcctggaagatggtgactgaggtacccaacctagacttgtccatcttctggattggccaacttaattaatgtatgaaataaaaggatgcacacatagtgacatgctaatcactataatgtgggcatcaaagttgtgtgttatgtgtaattactagttatctgaataaaagagaaagagatcatccatatttcttatcctaaatgaatgtcacgtgtctttataattctttgatgaaccagatgcatttcattaaccaaatccatatacatataaatattaatcatatataattaatatcaattgggttagcaaaacaaatctagtctaggtgtgttttgcgatccgatatcgacgtctaaaaacggcccctaactaacgcttagttgcccgctagattagtcccccgttagtgcctagttagacacacgacgaactaggggctagtgcgcacgataacttcgtatagcatacattatacgaagttataacagcggaccgggttaccgaattcctgcccttaaggccaattgttcaagattcattcaacaattgaaacatctcccatgattaaatcagtataaggttgctatggtcttgcttgacaaagtttttttttgagggaatttcaactaaatttttgagtgaaactatcaaatactgattttaaaaaatttttataaaaggaagcgcagagataaaaggccatctatgctacaaaagtacccaaaaatgtaatcctaaagtatgaattgcattttttttttgtttggacgaaaggaaaggagtattaccacaagaatgatatcatcttcatatttagatcttttttgggtaaagcttgagattctctaaatatagagaaatcagaagaaaaaaaaaccgtgttttggtggttttgatttctagcctccacaataactttgacggcgtcgacaagtctaacggacaccaagcagcgaaccaccagcgccgagccaagcgaagcagacggccgagacgttgacaccttcggcgcggcatctctcgagagttccgctccggcgctccacctccaccgctggcggtttcttattccgttccgttccgcctcctgctctgctcctctccacaccacacggcacgaaaccgttacggcaccggcagcacccagcacgggagaggggattcctttcccaccgttccttccctttccgccccgccgctataaatagccagccccatccccagcttttttccccaatctcatctcctctctcctgttgttcggagcacacgcacaatccgatcgatccccaaatccccttcgtctctcctcgcgagcctcgtggatcccagcttcaaggtacggcgatcgatcatcccccctccttctctctaccttcttttctctagactacatcggatggcgatccatggttagggcctgctagtttcccttcctgttttgtcgatggctgcgaggcacaatagatctgatggcgttatgacggctaacttgtcatgttgttgcgatttatagtccctttaggagatcagtttaatttctcggatggttcgagatcggtggtccatggttagtaccctaagatccgcgctgttagggttcgtagatggaggcgacctgttctgattgttaacttgtcagtacctgggaaatcctgggatggttctagctcgtccgcagatgagatcgatttcatgatcctctgtatcttgtttcgttgcctaggttccgtctaatctatccgtggtatgatgtagatgttttgatcgtgctaactacgtcttgtaaagttaattgtcaggtcataatttttagcatgcctttttttttgtttggttttgtctaattgggctgtcgttctagatcagagtagaagactgttccaaactacctgctggatttattgaacttggatctgtatgtgtgtcacatatcttcataaattcatgattaagatggattgaaatatcttttatctttttggtatggatagttctatatgttggtgtggctttgttagatgtatacatgcttagatacatgaagcaacgtgctgctactgtttagtaattgctgttcatttgtctaataaacagataaggatatgtatttatgttgctgttggttttgctggtactttgttggatacaaatgcttcaatacagaaaacagcatgctgctacgatttaccatttatctaatcttatcatatgtctaatctaataaacaaacatgcttttaaattatcttcatatgcttggatgatggcatacacagcggctatgtgtggttttttaaatacccagcatcatgggcatgcatgacactgctttaatatgctttttatttgcttgagactgtttcttttgtttatactgaccctttagttcggtgactcttctgcaggtcgactttaacttagcctaggatccatggcccagtccaagcacggcctgaccaaggagatgaccatgaagtaccgcatggagggctgcgtggacggccacaagttcgtgatcaccggcgagggcatcggctaccccttcaagggcaagcaggccatcaacctgtgcgtggtggagggcggccccttgcccttcgccgaggacatcttgtccgccgccttcatgtacggcaaccgcgtgttcaccgagtacccccaggacatcgtcgactacttcaagaactcctgccccgccggctacacctgggaccgctccttcctgttcgaggacggcgccgtgtgcatctgcaacgccgacatcaccgtgagcgtggaggagaactgcatgtaccacgagtccaagttctacggcgtgaacttccccgccgacggccccgtgatgaagaagatgaccgacaactgggagccctcctgcgagaagatcatccccgtgcccaagcagggcatcttgaagggcgacgtgagcatgtacctgctgctgaaggacggtggccgcttgcgctgccagttcgacaccgtgtacaaggccaagtccgtgccccgcaagatgcccgactggcacttcatccagcacaagctgacccgcgaggaccgcagcgacgccaagaaccagaagtggcacctgaccgagcacgccatcgcctccggctccgccttgccctccggactcagatctcgatagggtaccaatggccagttaacagatccagctgctgctgttctagggttcacaagtctgcctatttgtcttccccaatggagctatggttgtctggtctggtccttggtcgtgtcccgtttcattgtgtactatttacctgtaatgtgtatccttaagtctggtttgatggtgtctgaaacgttttgctgtggtagagcagcatggaagaactataatgaataagtgatccctaatcattgtgtccaaattttgcttctgctatacccttttgtgctgtttcttatgttttgcttaaaaatttgatctgacaaacaaatttgtctaaattatgctcttgttctgactgtgtactgtacacatttgtattgctaccggtttggcacatagttttctctttgattgcagatcaaacccttctgattgcagattgcttggctatggctgatgtgctcactgttcttctttagcttgtatattgctgatggtggcttggctacggctgaaaaagttgctgctgcgccgacttggcaactgttgctccagtaatgctttgtcctctcttcctagccgccgacttggcacttggcagctgttgctcctgtaatgcgttgttatctcttatctcttgagatgtactatgattttgaggctgtttgacttgtgccagattgccagtgctgatgctatattatctcaggtttttatgctagtatatgttttactgtgtgctgcctgtgtcgagttacgtaatctattgaaccgctatgcgtgttgatgccctgttgttgcttgccagattgatgcccctgttgcttgcagcttgcaagctgtagtgaaatcctaaaattcgaaaccaaatctattctgaacttttgaagatctgtgatgtccggaagaaaagattcaaacagataaacgggactctccagaatctataaaataaatgatcgacaaacgctttgctttggtaggcttcctagttagttagcggaccgaagcttcggtccgggcctagaaggccagcttcggccgcccctcggtaccctgggatcttccgacggcgtcttcaccgccccgccgccgcccgagccggacttgtcgctgccgccgccgctgctcatcttgcgcgcttgtgtccctccctcagtccctgcgttcgcggatcgcgggcgggtgcgacccgtttggactccggccggtagccttcgtgccgacctcgctcggtccaccggtttgtcggggacccacatgtcagtgaaggtacgcgtccacgtccacagaccctactaccccagacgagtccaaatcgctgttccctcacactctcgtgtaccagcgcgcggcggaaagcacctttccaacaaccgccgacacgtcggtcccacgtcggcatgctccaccggtcagtgtttggcgtgtacggctcccggcgacgaacgagtgtggcctaagctttcctactcccatcccatctgagccacacatctctctcacgccacgcgcacaaaacagccaggctcccacgcgcatcaaccggctctccctttccgtgccactcgcccccaagccccaaaccctcgccgccgcctccgagacagccgccgccacctaggccatggccaccgccgccgccgcgtctaccgcgctcactggcgccactaccgctgcgcccaaggcgaggcgccgggcgcacctcctggccacccgccgcgccctcgccgcgcccatcaggtgctcagcggcgtcacccgccatgccgatggctcccccggccaccccgctccggccgtggggccccaccgagccccgcaagggtgctgacatcctcgtcgagtccctcgagcgctgcggcgtccgcgacgtcttcgcctaccccggcggcgcgtcgatggagatccaccaggcactcacccgctcccccgtcatcgccaaccacctcttccgccacgagcaaggggaggcctttgccgcctccggctacgcgcgctcctcgggccgcgtcggcgtctgcatcgccacctccggccccggcgccaccaacctagtctccgcgctcgccgacgcgctgctcgattccgtcccgatggtcgccatcacgggacaggtggcgcgacgcatgattggcaccgacgccttccaggagacgcccatcgtcgaggtcacgcgctccatcaccaagcacaactacctggtcctcgacgtcgacgacatcccccgcgtcgtgcaggaggctttcttcctcgcctcctctggtcgaccagggccggtgcttgtcgacatccccaaggacatccagcagcagatggcggtgcctgtctgggacaagcccatgagtctgcctgggtacattgcgcgccttcccaagccccctgcgactgagttgcttgagcaggtgctgcgtcttgttggtgaatcgcggcgccctgttctttatgtgggcggtggctgcgcagcatctggtgaggagttgcgacgctttgtggagctgactggaatcccggtcacaactactcttatgggcctcggcaacttccccagcgacgacccactgtctctgcgcatgctaggtatgcatgggacggtgtatgcaaattatgcagtggataaggccgatctgttgcttgcacttggtgtgcggtttgatgatcgcgtgacagggaagattgaggcttttgcaagcagggctaagattgtgcacgttgatattgatccggctgagattggcaagaacaagcagccacatgtgtccatctgtgcagatgttaagcttgctttgcagggcatgaatgctcttcttgaaggaagcacatcaaagaagagctttgactttggctcatggaacgatgagttggatcagcagaagagggaattcccccttgggtataaaacatctaatgaggagatccagccacaatatgctattcaggttcttgatgagctgacgaaaggcgaggccatcatcggcacaggtgttgggcagcaccagatgtgggcggcacagtactacacttacaagcggccaaggcagtggttgtcttcagctggtcttggggctatgggatttggtttgccggctgctgctggtgcttctgtggcaaacccaggtgtcactgttgttgacatcgatggagatggtagctttctcatgaacgttcaggagctagctatgatccgaattgagaacctcccagtgaaggtctttgtgctaaacaaccagcacctggggatggtggtgcagttggaggacaggttctataaggccaacagagcgcacacatacttgggaaacccagagaatgaaagtgagatatatccagatttcgtgacgatcgccaaagggttcaacattccagccgtccgtgtgacaaagaagaacgaagtccgcgcagcgataaagaagatgctcgagactccagggccgtacctcttggatataatcgtcccacaccaggagcatgtgttgcctatgatccctagtggtggggctttcaaggatatgatcctggatggtgatggcaggactgtgtactgacttcgaataggtacccggggatcctctagtgccgtgggtcgtttaagctgccgctgtacctgtgtcgtctggtgccttctggtgtacctgggaggttgtcgtctatcaagtatctgtggttggtgtcatgagtcagtgagtcccaatactgttcgtgtcctgtgtgcattatacccaaaactgttatgggcaaatcatgaataagcttgatgttcgaacttaaaagtctctgctcaatatggtattatggttgtttttgttcgtctcctaatatttgcctgggatcaaattttattggctggtgttcatttgacctccatgttcttgctaggctccattttttactctacagccataatatgtttgattgtttggtttgttctttgttgtacacctggttctgtcgagcttagttttcgacactggcttacagcttaacatgttgctattttattgggttctgattgctattttattgggttctgattgctagtttttgctgaatccaaaaaccatgttatttatttaagcgatccaggttattattatgatggtggctaagtttttttttttccaagggtaaattttctggattctccagtgtttctgtgccgaattcaatcactagagtcgacctgcaaagcttcggtccgggcctagaaggcccgcgccacttacgcttgattccgatgacttcgtaggttcctagctcaagccgctcgtgtccaagcgtcacttacgattagctaatgattacggcatctaggaccgactagttcttatgtgcttctagtctccaaatgtggttgatagttattttgctctaagatcaacagtaatgaagtataaatcatcgttgtggtgtgctactcggttaattgagcattaacacacacaaacatgacgaggatggtataatctccaaaaatgtgtactttgttaggtgggaccctatagccttgattaatgtgctatgttaggcatgcctggaaacgtgtgacgcatatgttttgtgaacctgttgatattatatgtgcttttatattaccatattttattaaaatactaatatttattactagtaagatataacattctatctagcttaaaaactaaccataaatattccataataactagatttaccaaactaatatactaaatatacataataaatacaaaattaacaagacaataatcaatatttatgagcttaatatatttagacattatggttggtcgacgataatcatgctaacttttcgtaattgcttgattgaaatatgcttagaataatgcctctttgttctacatggcaaatagggaccattatggtgtaacaccctgggaaccacaaacaccccgaaatgctactaaactacacaactaaccttcatatataaaatttcgacagcatctcctttgaaaatttgcatagacgtggaagcaacagagtataaacagatctgcgtttaaacgtgcaagcgctactagacaattcagtacattaaaaacgtccgcaatgtgttattaagttgtctaagcgtcaatttgtttacaccacaatatatcctgcca

SEQ ID NO: 276 - DNA, 25638 bp, synthetic construct
  misc_feature 1..25638: note = PHP100159
  source 1..25638: mol_type = other DNA
gtttacccgccaatatatcctgtcaaacactgcggccgcacttgaccgcggatggagccggagctgtggtgaggccatcgacgggaggtgggggagaacacagtctcagtgttctttgtgagtccgcaaggtttttagcttttctgtattaattaaggttgctgttggctgtagaatacggtcgtggaagagctgtatcggtagctactacgtaagctattatatactggaagtctggagctcgtcgatctccggtcgtcttcctccatttctcctcgtcttgctttgactgctgctaccatttgcttctgttttctgatgaagcatgccatgtcggccaccagtgtttgtgtggtttttgcagggaatggctttcaagtgctgtgattgaatggccctcgtcgtcctcggctgagctcacatggacgcgtcatgtgagtgagatatatgatcatatgatgagtggggttcgggtgagtgcgtacttgaagtaggatcccgctttcactcattcattcattggcctttaaaccgggaaattttcgcgaggagatggagggaagcaagcagggtgacgagtgcagagtgccgcgagcgctttgtcaaaaggcaccgccgtaggcaaaaaaatcaatggccctgactgactcgatggtagtactactgtagagactagagagggttgctccccatatcttcgtgtgacttttactccagcattgcatttccgtcattgagacgttaattaatagcagctttcgggacagatgactgtggccatgtttcgtcacggccgcttcgtgccagctgggggtactatagtactgtgattttgttagtaaaaactttcattaggccaccattgacgaccgggccttcgcttttgctgcgctaattaaccatttcccggcgaccgaagggaacatgaacatgccccgacacatgagggcatgaggactagtgttctccctgtcgttcgttgacttgactagtgatagtttaaacgctcttcaactggaagagcggttactaccggttcactagctagctgctaatcgagctagttaccctatgaggtgacatgaagcgctcacggttactatgacggttagcttcacgactgttggtggcagtagcgtacgacttagctatagttccggacttacccttaagataacttcgtatagcatacattatacgaagttatgggcccacgcgtgaagagcggttaccagagctggtcacctttgtccaccaagatggaactgtcttcggccagaatggccatctggattcagcaggcctagaaggccatttatcgctatcaactttgtatagaaaagttgggccgagctcggtacggccagaatggcccggaccgggttaccaagcggccgcacactgatagtttaaactgaaggcgggaaacgacaatctgatcatgagcggagaattaagggagtcacgttatgacccccgccgatgacgcgggacaagccgttttacgtttggaactgacagaaccgcaacgattgaaggagccactcagccgcgggtttctggagtttaatgagctaagcacatacgtcagaaaccattattgcgcgttcaaaagtcgcctaaggtcactatcagctagcaaatatttcttgtcaaaaatgctccactgacgttccataaattcccctcggtatccaattagagtctcatattcactcccatggcggccaatgcgggcggcggtggagcgggaggaggcagcggcagcggcagcgtggctgcgccggcggtgtgccgccccagcggctcgcggtggacgccgacgccggagcagatcaggatgctgaaggagctctactacggctgcggcatccggtcgcccagctcggagcagatccagcgcatcaccgccatgctgcggcagcacggcaagatcgagggcaagaacgtcttctactggttccagaaccacaaggcccgcgagcgccagaagcgccgcctcaccagcctcgacgtcaacgtgcccgccgccggcgcggccgacgccaccaccagccaactcggcgtcctctcgctgtcgtcgccgccgccttcaggcgcggcgcctccctcgcccaccctcggcttctacgccgccggcaatggcggcggatcggctgtgctgctggacacgagttccgactggggcagcagcggcgctgctatggccaccgagacatgcttcctgcaggactacatgggcgtgacggacacgggcagctcgtcgcagtggccacgcttctcgtcgtcggacacgataatggcggcggccgcggcgcgggcggcgacgacgcgggcgcccgagacgctccctctcttcccgacctgcggcgacgacggcggcagcggtagcagcagctacttgccgttctggggtgccgcgtccacaactgccggcgccacttcttccgttgcgatccaacagcaacaccagctgcaggagcagtacagcttttacagcaacagcaacagcacccagctggccggcaccggcaaccaagacgtatcggcaacagcagcagcagccgccgccctggagctgagcctcagctcatggtgctccccttaccctgctgcagggagtatgtgagagcaacgcgagctgccactgctcttcactgatgtctctggaatggaaggaggaggaagtgagaacagatcattcgacaaagcagcattagtccgttgatcggtggaagaccactcgtcagtgttgagttgaatgtttgatcaataaaatacggcaatgctgtaagggttgttttttatgccattgataatacactgtactgttcagttgttgaactctatttcttagccatgccaagtgcttttcttattttgaataacattacagcaaaaagttgaaagacaaaaaaaaaaacccccgaacagagtgctttgggtcccaagcttctttagactgtgttcggcgttccccctaaatttctccccctatatctcactcacttgtcacatcagcgttctctttccccctatatctccacgctctacagcagttccacctatatcaaacctctataccccaccacaacaatattatatactttcatcttcaactaactcatgtaccttccaatttttttctactaataattatttacgtgcacagaaacttagcaaggagagagagagcgggaatttaaatgctcggcgttaggcttttagtccgctaggtggctagaccgaggttaggacgctagttcactaggggcctagtggtgttttaagacgtcacggtcaccacgcgtggaccgaagcttgcatgcctgcatcactgactagctaaacagcggccgcatcgagcagctggcttgtggggaccagacaaaaaaggaatggtgcagaattgttaggcgcacctaccaaaagcatctttgcctttattgcaaagataaagcagattcctctagtacaagtggggaacaaaataacgtggaaaagagctgtcctgacagcccactcactaatgcgtatgacgaacgcagtgacgaccacaaaactcgagcaacgagatcatgagccaatcaaagaggagtgatgtagacctaaagcaataatggagccatgacgtaagggcttacgcccatacgaaataattaaaggctgatgtgacctgtcggtctctcagaacctttactttttatgtttggcgtgtatttttaaatttccacggcaatgacgatgtgaccgtcgacccactaaaacattgctttgtcaaaagctaaaaaagatgatgcccgacagccacttgtgtgaagcatgagaagccggtccctccactaagaaaattagtgaagcatcttccagtggtccctccactcacagctcaatcagtgagcaacaggacgaaggaaatgacgtaagccatgacgtctaatcccagggcccggtgaccaatcgaattagcttggcgcgtggaccgaagcttgcatgcctgcagtgcagcgtgacccggtcgtgcccctctctagagataatgagcattgcatgtctaagttataaaaaattaccacatattttttttgtcacacttgtttgaagtgcagtttatctatctttatacatatatttaaactttactctacgaataatataatctatagtactacaataatatcagtgttttagagaatcatataaatgaacagttagacatggtctaaaggacaattgagtattttgacaacaggactctacagttttatctttttagtgtgcatgtgttctcctttttttttgcaaatagcttcacctatataatacttcatccattttattagtacatccatttagggtttagggttaatggtttttatagactaatttttttagtacatctattttattctattttagcctctaaattaagaaaactaaaactctattttagtttttttatttaataatttagatataaaatagaataaaataaagtgactaaaaattaaacaaataccctttaagaaattaaaaaaactaaggaaacatttttcttgtttcgagtagataatgccagcctgttaaacgccgtcgacgagtctaacggacaccaaccagcgaaccagcagcgtcgcgtcgggccaagcgaagcagacggcacggcatctctgtcgctgcctctggacccctctcgagagttccgctccaccgttggacttgctccgctgtcggcatccagaaattgcgtggcggagcggcagacgtgagccggcacggcaggcggcctcctcctcctctcacggcaccggcagctacgggggattcctttcccaccgctccttcgctttcccttcctcgcccgccgtaataaatagacaccccctccacaccctctttccccaacctcgtgttgttcggagcgcacacacacacaaccagatctcccccaaatccacccgtcggcacctccgcttcaaggtacgccgctcgtcctcccccccccccctctctaccttctctagatcggcgttccggtccatgcatggttagggcccggtagttctacttctgttcatgtttgtgttagatccgtgtttgtgttagatccgtgctgctagcgttcgtacacggatgcgacctgtacgtcagacacgttctgattgctaacttgccagtgtttctctttggggaatcctgggatggctctagccgttccgcagacgggatcgatttcatgattttttttgtttcgttgcatagggtttggtttgcccttttcctttatttcaatatatgccgtgcacttgtttgtcgggtcatcttttcatgcttttttttgtcttggttgtgatgatgtggtctggttgggcggtcgttctagatcggagtagaattctgtttcaaactacctggtggatttattaattttggatctgtatgtgtgtgccatacatattcatagttacgaattgaagatgatggatggaaatatcgatctaggataggtatacatgttgatgcgggttttactgatgcatatacagagatgctttttgttcgcttggttgtgatgatgtggtgtggttgggcggtcgttcattcgttctagatcggagtagaatactgtttcaaactacctggtgtatttattaattttggaactgtatgtgtgtgtcatacatcttcatagttacgagtttaagatggatggaaatatcgatctaggataggtatacatgttgatgtgggttttactgatgcatatacatgatggcatatgcagcatctattcatatgctctaaccttgagtacctatctattataataaacaagtatgttttataattattttgatcttgatatacttggatgatggcatatgcagcagctatatgtggatttttttagcactgccttcatacgctatttatttgcttggtactgtttcttttgtcgatgctcaccctgttgtttggtgttacttctgcaggtcgactttaacttagcctaggatccatggccactgtgaacaactggctcgctttctccctctccccgcaggagctgccgccctcccagacgacggactccacactcatctcggccgccaccgccgaccatgtctccggcgatgtctgcttcaacatcccccaagattggagcatgaggggatcagagctttcggcgctcgtcgcggagccgaagctggaggacttcctcggcggcatctccttctccgagcagcatcacaaggccaactgcaacatgatacccagcactagcagcacagtttgctacgcgagctcaggtgctagcaccggctaccatcaccagctgtaccaccagcccaccagctcagcgctccacttcgcggactccgtaatggtggcttcctcggccggtgtccacgacggcggtgccatgctcagcgcggccgccgctaacggtgtcgctggcgctgccagtgccaacggcggcggcatcgggctgtccatgattaagaactggctgcggagccaaccggcgcccatgcagccgagggtggcggcggctgagggcgcgcaggggctctctttgtccatgaacatggcggggacgacccaaggcgctgctggcatgccacttctcgctggagagcgcgcacgggcgcccgagagtgtatcgacgtcagcacagggtggagccgtcgtcgtcacggcgccgaaggaggatagcggtggcagcggtgttgccggcgctctagtagccgtgagcacggacacgggtggcagcggcggcgcgtcggctgacaacacggcaaggaagacggtggacacgttcgggcagcgcacgtcgatttaccgtggcgtgacaaggcatagatggactgggagatatgaggcacatctttgggataacagttgcagaagggaagggcaaactcgtaagggtcgtcaagtctatttaggtggctatgataaagaggagaaagctgctagggcttatgatcttgctgctctgaagtactggggtgccacaacaacaacaaattttccagtgagtaactacgaaaaggagctcgaggacatgaagcacatgacaaggcaggagtttgtagcgtctctgagaaggaagagcagtggtttctccagaggtgcatccatttacaggggagtgactaggcatcaccaacatggaagatggcaagcacggattggacgagttgcagggaacaaggatctttacttgggcaccttcagcacccaggaggaggcagcggaggcgtacgacatcgcggcgatcaagttccgcggcctcaacgccgtcaccaacttcgacatgagccgctacgacgtgaagagcatcctggacagcagcgccctccccatcggcagcgccgccaagcgcctcaaggaggccgaggccgcagcgtccgcgcagcaccaccacgccggcgtggtgagctacgacgtcggccgcatcgcctcgcagctcggcgacggcggagccctggcggcggcgtacggcgcgcactaccacggcgccgcctggccgaccatcgcgttccagccgggcgccgccagcacaggcctgtaccacccgtacgcgcagcagccaatgcgcggcggcgggtggtgcaagcaggagcaggaccacgcggtgatcgcggccgcgcacagcctgcaggacctccaccacctgaacctgggcgcggccggcgcgcacgactttttctcggcagggcagcaggccgccgccgctgcgatgcacggcctgggtagcatcgacagtgcgtcgctcgagcacagcaccggctccaactccgtcgtctacaacggcggggtcggcgacagcaacggcgccagcgccgtcggcggcagtggcggtggctacatgatgccgatgagcgctgccggagcaaccactacatcggcaatggtgagccacgagcaggtgcatgcacgggcctacgacgaagccaagcaggctgctcagatggggtacgagagctacctggtgaacgcggagaacaatggtggcggaaggatgtctgcatgggggactgtcgtgtctgcagccgcggcggcagcagcaagcagcaacgacaacatggccgccgacgtcgggcatggcggcgcgcagctcttcagtgtctggaacgacacttaagcgtacctagtggtacctgacatcttatagtctgcaacctctcgtgtctgaattcctatctttatcaagtgttattgcttccacgactataggacagctttcgtcgaaagcttttgctcatgtgatctcgaaggattcatctagtctgatttttcgtgacttgtatcggttttattggattcatccaacatatatcaataaaaaatgagttgtgtttcctttcttcctagttcagttaaaattatttccctcctgcgcttgtgctgtaattgtctgtgtacctgttgtttgtgactgtgttagttcccttggatatgatttcgtatttgatatgtacatggagatagcttagcttcattattggagtatgaagttagtatgacatagtcactctcctggaaaattgacactgcaaaccatatttttattctgaaccacaaatcctagtcagtccgctggcatatgccgtccgtttgctgaatccagaacgtgggtttggagatgtacggctgagatgcctctatgcgaaggggatttcgtggtgaaacgagatgggagtagagcaacgcccgtggaagatgcttcaaacttccacacttttgagcaacgatcggcagtagtaaggtagacgatttcaagatcaaagcatatgaagataaacaacatcaacaacaaaatttgttggggttctatagagagaaacagagctacatacatacactgttttgtatctaccatctgagatgatgaaaagatgaaaaactaaagaatgccccggcgccaacgccaggacacgccgcgcgcgcgtcacccgagccatctcttgacccagccggcgctgtatatttacacacgttgcagcatcgatcaccacctgttcgatcgcgtcgccgtcaccggcgcgccgcgacttattgaactagtctagggcgcggctaacaacctagcttagattgccttgtctaaacccttaggctaacgcgccacggtaacccggtccgggcctagaaggccccagagctggtcaccccatacgattggaagcttcaagtttgtacaaaaaagcaggctccggccagagttacccggaccgaagcttgcatgcctgcagtgcagcgtgacccggtcgtgcccctctctagagataatgagcattgcatgtctaagttataaaaaattaccacatattttttttgtcacacttgtttgaagtgcagtttatctatctttatacatatatttaaactttactctacgaataatataatctatagtactacaataatatcagtgttttagagaatcatataaatgaacagttagacatggtctaaaggacaattgagtattttgacaacaggactctacagttttatctttttagtgtgcatgtgttctcctttttttttgcaaatagcttcacctatataatacttcatccattttattagtacatccatttagggtttagggttaatggtttttatagactaatttttttagtacatctattttattctattttagcctctaaattaagaaaactaaaactctattttagtttttttatttaataatttagatataaaatagaataaaataaagtgactaaaaattaaacaaataccctttaagaaattaaaaaaactaaggaaacatttttcttgtttcgagtagataatgccagcctgttaaacgccgtcgacgagtctaacggacaccaaccagcgaaccagcagcgtcgcgtcgggccaagcgaagcagacggcacggcatctctgtcgctgcctctggacccctctcgagagttccgctccaccgttggacttgctccgctgtcggcatccagaaattgcgtggcggagcggcagacgtgagccggcacggcaggcggcctcctcctcctctcacggcaccggcagctacgggggattcctttcccaccgctccttcgctttcccttcctcgcccgccgtaataaatagacaccccctccacaccctctttccccaacctcgtgttgttcggagcgcacacacacacaaccagatctcccccaaatccacccgtcggcacctccgcttcaaggtacgccgctcgtcctcccccccccccctctctaccttctctagatcggcgttccggtccatgcatggttagggcccggtagttctacttctgttcatgtttgtgttagatccgtgtttgtgttagatccgtgctgctagcgttcgtacacggatgcgacctgtacgtcagacacgttctgattgctaacttgccagtgtttctctttggggaatcctgggatggctctagccgttccgcagacgggatcgatttcatgattttttttgtttcgttgcatagggtttggtttgcccttttcctttatttcaatatatgccgtgcacttgtttgtcgggtcatcttttcatgcttttttttgtcttggttgtgatgatgtggtctggttgggcggtcgttctagatcggagtagaattctgtttcaaactacctggtggatttattaattttggatctgtatgtgtgtgccatacatattcatagttacgaattgaagatgatggatggaaatatcgatctaggataggtatacatgttgatgcgggttttactgatgcatatacagagatgctttttgttcgcttggttgtgatgatgtggtgtggttgggcggtcgttcattcgttctagatcggagtagaatactgtttcaaactacctggtgtatttattaattttggaactgtatgtgtgtgtcatacatcttcatagttacgagtttaagatggatggaaatatcgatctaggataggtatacatgttgatgtgggttttactgatgcatatacatgatggcatatgcagcatctattcatatgctctaaccttgagtacctatctattataataaacaagtatgttttataattattttgatcttgatatacttggatgatggcatatgcagcagctatatgtggatttttttagccctgccttcatacgctatttatttgcttggtactgtttcttttgtcgatgctcaccctgttgtttggtgttacttctgcaggtcgactttaacttagcctaggatccatggcgcccagcagctacgaggtggcggcttccatcctcctctgcgccgaggacagcagcagcatcctggacctcgaagcggaggccgaggaggaagcgctactggcgcggagcggggagcccggcggcggcgcggagttccccgtgccgtccgaggaatgcgtcgccggtttcctggagtctgaggcagcgcacatgccgcgggaggactacgccgagaggctgcgcagcggggggatggatctccgcgtccggacggacgccatcgactggatttggaaggttcacacgtgctacggtttcggccctctcactgcctgcttggccgtcaactacctggaccgcttcctctcgctctaccagcttccggaaggcaaggcttggatgacacagctgctgtccgtggcgtgcttgtccctggccgccaagatggaggagacctacgtcccttcgtccctggacctgcaggccggggacgcgcggtacgtgttcgaggcgaagacgatccagaggatggagctcctggtcctcagcacgctcaagtggaggatgcaagcggtcacccccttgtcgtacgtcgactacttcctccaccggctccgaggcggcgccgcgccgagcagacgcgccgtcctccgatccgcggagctcatcctgtgcatcgccagagggacgcactgcttggatttcaggccctcggagatcgccttggccgtcgccgccaccgtggccggcgaagagcgcgccgtggacatcgacagggccttcacccaccgtgtacataaggagagggtgtcgcgatgcctcgaagcgatccagcaggccaccgccaccatggccctgccgcagccgctgaaaagtgaaggcccgagcagcagcggccgcagggcctcgtcttcctcggccaccgtgccgcggagccccaccggggtgctggacgctggctgcctgagctacaggagagccgccgccgccgccgcctcgcacgcgagctccagctggcgcgacgaggacgacgacgactgccccccggctgtctgcagcaagaggaggaagattagcagatgaggtaccgttaacagatctactaactatctatactgtaataatgttgtatagccgccggatagctagctagtttagtcattcagcggcgatgggtaataataaagtgtcatccatccatcaccatgcgtggcaacgtgagcaatgacctgattgaacaaattgaaatgaaaagaagaaatatgttatatgtcaacgagatttcctcataatgccactgacgacgtgtgtccaagaaatgtatcagtgatacgtatattcacaatttttttatgacttatactcacaatttgtttttttactacttatactcacaatttgttgtgcgtaccataacaatttcgatcgaatatatatcagaaagttgacgaaagtaagctcactcaaaaagttaaatgggctgcggaagctgcgtcaggcccaagttttggctattctatccggtatccacgattttgatggctgagggacatatgttcgcttaagcttcggtccgggcctagaaggccgatctcccgggcacccagctttcttgtacaaagtggccgttaacggatcggccagaatggcccggaccgggttaccccgcggttcaaagccaatgactgttgttaggtccagtttctaaggacgaatcatccaatcactggttctttctgaacaaaacaaagagctatagagttacgttactgtagccgagacagagcctgcaatctggttatgccacatactaggttctttcttaaagttgactcactctatcctaagttctacttacaaggagctacaacaaattggtcataaccggagagcgttcaaggaggtaatatcccatcttactctgtagcaaggctacaaaaggagagctaaagaactaggctacaaaaagagagctaaagaactaactatctagcaagactacagagctatagtgtagagatttcataaccggtgagcgttcaaggatactttgaagagaagaggtaatatctcaactagcaagactacaaaaaaatggagatataaaactaactgtctaacaagactacagagctatagtagagatagatacgttcgacacttaagcatgagaattcgagctcggtaccctggttcacaaactcaatacaacacacagtggagtagggtattacgctccggcggcccgaaccactctaaatccttgtgtcctcgtgtgctcttccaccattaatgactgtaattgcagggacacgaagagttgtagcgcttttgccaacaagatccgctatatgctagtagagtggaacctgcacagcaacaagcatccaataatctgagaataagaattatgtgtggtgatggttctcatctctgcaactcgccattttcgcgagagaaccaaatccaagttggtgaagatcatgatttgggctcatgggctggcatagtagctattacctttgcaattgtggttcgaatctatccgatattctccttttcagggagagctaatgcttatgcttattgggtattttggtttgacactgcttcacgcccaaaaaaaggcaactatgtctgagttggatatggcccaaaaaaaggcagctatgtctgagttggatatggaagtcttctttcgtttagggtgaagtaagaccaagctcatgagcttattatcttaggtcggaacaaattagttgataggcatggcacatttatcaaattataatgattttaacagaaaagcaacacctctttttcagcagcaccagctttgcaagctgcaattgacactccaagcatagtatttgctccaaactcagcctgcatttcgcacaatatcatatctatttccatttggataaaatatattttccagaaatatgggaacagaatcaagatacagaaaaaagttgtggtagtagtggtaagtggaaacacaagtacagtgaaaagatagcattatttctgaacagtcaaattaaccgaaataagtagtatcacatactgcccctaaattgactacacccaatgtaaagaattgcttgagcatattgagccatcagttgtttgtttgtgtaacggatttgacaatgcagagttcaggagcaaaaaaccgcaaaggagagaaagagggaaaggatctcctagtatcccaccttgtggcgcgccctgtcaagtgcatgatggcctggtcgatctgcgtctgctgctgcggttccatcccaacgagtgcctccgacaccttgtcgttgatcacccgcaccgcgtaggcgacccccctggcgaggaacttccgcctctcggaggccccggccgcgtcggcggcggcgccctcgagcgcgcccacgctagccgtagatgctcggtgcacggccttgttggtgtgcaactcgacctcaacggccggtgcgctacgcccgtcaaggatctggcgcgcccgcaccctcgtgatcacggtgggcgcctcccgcctcatgtggccgacgatgaaaagcgccgggttaggggccttggcgcgcaccgccgtattcagggcctcctcgctcttgcgcgagagcaggtgcttccccaggtactcctgcactgacaaggctgccacagcggtggaatttgtcctcacgacttcgccacgtcgtcctcacctccctggcttcccacgactccgccgtatcgaggtgctcggtgggtcgtcttaatccgaagtccgaactaggaagacgagacagagaggtctgaggaatgggcctcgtttgatgttgagctgaattatttttccagcataagcccaggtcttggtccatgaacaaaattactagaaacccagcccagtactacgatctaaaagagggactgccactggatagctctctctagcattctccacgctccaatacagcggcgtcgtgtctatccgggtctatccgcgaacacgtgagaactctccagaaactgctttctcctccacttcatctctctcgctttccctctataaaaagaccccttctaggaattgagggagacagcaagcaccaagcagcgatccgaagctcaatcaattcactcaaacctcttccccaaatcttcgattagatcttcgttgacaagaagactagaaccgaacctgacatgtccaacctgctcacggttcaccagaaccttccggctcttccagtggacgcgacgtccgatgaagtcaggaagaacctcatggacatgttccgcgacaggcaagcgttcagcgagcacacctggaagatgctgctctccgtctgccgctcctgggctgcatggtgcaagctgaacaacaggaagtggttccccgctgagcccgaggacgtgagggattaccttctgtacctgcaagcgcgaggtttgtttctgcttctacctttgatatatatataataattatcattaattagtagtaatataatatttcaaatatttttttcaaaataaaagaatgtagtatatagcaattgcttttctgtagtttataagtgtgtatattttaatttataacttttctaatatatgaccaaaacatggtgatgcctaggtctggcagtgaagaccatccagcaacaccttggacaactgaacatgcttcacaggcgctccggcctcccgcgccccagcgactcgaacgccgtgagcctcgtcatgcgccgcatcaggaaggaaaacgtcgatgccggcgaaagggcaaagcaggccctcgcgttcgagaggaccgatttcgaccaggtccgcagcctgatggagaacagcgacaggtgccaggacattaggaacctggcgttcctcggaattgcatacaacacgctcctcaggatcgcggaaattgcccgcattcgcgtgaaggacattagccgcaccgacggcggcaggatgcttatccacattggcaggaccaagacgctcgtttccaccgcaggcgtcgaaaaggccctcagcctcggagtgaccaagctcgtcgaacgctggatctccgtgtccggcgtcgcggacgacccaaacaactacctcttctgccgcgtccgcaagaacggggtggctgcccctagcgccaccagccaactcagcacgagggccttggaaggtattttcgaggccacccaccgcctgatctacggcgcgaaggatgacagcggtcaacgctacctcgcatggtccgggcactccgcccgcgttggagctgctagggacatggcccgcgccggtgtttccatccccgaaatcatgcaggcgggtggatggacgaacgtgaacattgtcatgaactacattcgcaaccttgacagcgagacgggcgcaatggttcgcctcctggaagatggtgactgaggtacccaacctagacttgtccatcttctggattggccaacttaattaatgtatgaaataaaaggatgcacacatagtgacatgctaatcactataatgtgggcatcaaagttgtgtgttatgtgtaattactagttatctgaataaaagagaaagagatcatccatatttcttatcctaaatgaatgtcacgtgtctttataattctttgatgaaccagatgcatttcattaaccaaatccatatacatataaatattaatcatatataattaatatcaattgggttagcaaaacaaatctagtctaggtgtgttttgcgatccgatatcgaattggccacggtaccagctgctgctgttctagggttcacaagtctgcctatttgtcttccccaatggagctatggttgtctggtctggtccttggtcgtgtcccgtttcattgtgtactatttacctgtaatgtgtatccttaagtctggtttgatggtgtctgaaacgttttgctgtggtagagcagcatggaagaactataatgaataagtgatccctaatcattgtgtccaaattttgcttctgctatacccttttgtgctgtttcttatgttttgcttaaaaatttgatctgacaaacaaatttgtctaaattatgctcttgttctgactgtgtactgtacacatttgtattgctaccggtttggcacatagttttctctttgattgcagatcaaacccttctgattgcagattgcttggctatggctgatgtgctcactgttcttctttagcttgtatattgctgatggtggcttggctacggctgaaaaagttgctgctgcgccgacttggcaactgttgctccagtaatgctttgtcctctcttcctagccgccgacttggcacttggcagctgttgctcctgtaatgcgttgttatctcttatctcttgagatgtactatgattttgaggctgtttgacttgtgccagattgccagtgctgatgctatattatctcaggtttttatgctagtatatgttttactgtgtgctgcctgtgtcgagttacgtaatctattgaaccgctatgcgtgttgatgccctgttgttgcttgccagattgatgcccctgttgcttgcagcttgcaagctgtagtgaaatcctaaaattccaaaccaaatctattctgaacttttgaagatctgtgatgtccggaagaaaagattcaaacagataaacgggactctccagaatctataaaataaatgatcgacaaacgctttgctttggtaggcttcaagcttggtcacccggtccgggcctagaaggccagcttcggccgccccgggcaactttattatacaaagttgatagataaatcagatatctggttcctaaggacccggcggaccgattaaactgattcggtccgacgcgttacctaataacttcgtatagcatacattatacgaagttattagctaactaactagtaagcttaagccatgggtcgacggatccgttaactagcgtggcatttggcaccgccgcacactatgcgagctaggagtgctagtttacagatgaaactatgaaaccaagaaaacacaattgtccgtagctagcgcgtggcgtcgtgtcaagcttcacacagtatcttcgttcttcactataaatcgcgcctgttgttcgtgagacccaccaccgtggataacagtcccctaataataagcgatcaacagcactgctgatggctgaacaccgaggcgccgccgcgcgtaaccatccgccggagcagcccgtcgtgccggcgaacgacgccttccccgaccgcgcccagcagctctgcctcgacgccgggcgcgcgctcgcgatgtgcggcgtgctcgtcgccgtccctcccgcattttacgcgtcgacgtcgcggacgacaccgcacttgccttcgtcggcttcgtcctctggatcatcggtgcgtggctgtgcctcctggcgctcacgcccttggctccacgggcggtgagggcgggcggggccgccgccagcaccttgctgatcaggtgcctgtccctttcatgaactactagcgcccgcgcccgcggccgccgggcacaagagaacacatcgatgttcgctgcgtacgtcagcaataaggcactctttgtcagtagtcgagtgcatatgttgggtgtttgccctgggagatttcaagtgttgtggccattatcccgcaggataaaaaatcggcggcttttggattgatacggaaaataacgatgtttcatgctcgtgttgtgtgtgtgacatcttgtcagccaagtttttaaccgttgctactccccctctgtgggctcagtgtgtggaccggaatacgtcgtacataggccgtagcctaagcccaatatgccgtttttcaggttggcctgtgtgacgacaagcgggtctcaaaagcccatcacgcaactggcctgcaattattggaggagagcgcgtcgagttggttccagaggctgcgtggtggggccggactctgcgacgacctctcgttcgcgtccgatttggttgccgtgagccgtgacgtaacgcctccttccgttcctccctatataagttccacccccgggtccggtttccccaagccccagtgacccccgatcccgatcgcgaaatctccgcacccgccggcaagggaccgaagcaagcctctctcccgaccgtcgcatcaaggtacgcgtccgctcgatctgtcctcttccttctcgatttgacttgctgtggtgcccgatcacgggatcagaatcgcaccagtgtagatttcgcatgttctaagatgtgttagtttccaggctaatccagttctcttgacgcccgatccgatcgagctccgtgtttatttcagcctaatcgtagtattcccctaaaatttcctcattagggggttcgcaagattgttggtcgacaggttcacttatgctcgatcgcttacttttagtcgattcatgctgcgtactattgttgccccccgtggttttatcttttctcgtgtgaaatccagtagatatagtagatatcgtagcattaggttttaattcaatcgattgattattgtatcatcaaaattgagaagttcgaatcatgcctatcatgctgcctcaaccgaaatcctgtatattgaagtttcaattcaattgattgatcattcattagattcaaccaaaatctagaaggttagatgacgcatgtcatgctgcctgcgtagtttacctttgatctgtttatgattaccttatcagtaggatatttgtgattttgggaagtagcactaactgattcatgctgacatgatgttccctttcagattatactgttgagtcctatctaattgatgctttgtatgctatatgaatacgtcatggtaaattagcagttaattagcatattagcaattgggcgtacctcatcaggattgctcttgtagatgtgtgtggtgatgtttcttgttcaattcatgttctgctttaaaagtatgtgttctctgtttgttaattaagattcatggttataatgatttggacctaattaatcagggttgcccttttagatgcgtggttacttgttgagttcatttttttcctgctatagttgtatgcgtttgttcattcatggttagatttgatttgtttcttctctattccatgccttccatatacttcaattgtagcttaacatgagatttctgtatatgcaggtcgaccgccggggatccacacgacaccatggcccagtccaagcacggcctgaccaaggagatgaccatgaagtaccgcatggagggctgcgtggacggccacaagttcgtgatcaccggcgagggcatcggctaccccttcaagggcaagcaggccatcaacctgtgcgtggtggagggcggccccttgcccttcgccgaggacatcttgtccgccgccttcatgtacggcaaccgcgtgttcaccgagtacccccaggacatcgtcgactacttcaagaactcctgccccgccggctacacctgggaccgctccttcctgttcgaggacggcgccgtgtgcatctgcaacgccgacatcaccgtgagcgtggaggagaactgcatgtaccacgagtccaagttctacggcgtgaacttccccgccgacggccccgtgatgaagaagatgaccgacaactgggagccctcctgcgagaagatcatccccgtgcccaagcagggcatcttgaagggcgacgtgagcatgtacctgctgctgaaggacggtggccgcttgcgctgccagttcgacaccgtgtacaaggccaagtccgtgccccgcaagatgcccgactggcacttcatccagcacaagctgacccgcgaggaccgcagcgacgccaagaaccagaagtggcacctgaccgagcacgccatcgcctccggctccgccttgccctccggactcagatctcgatagagtcaacctagacttgtccatcttctggattggccaacttaattaatgtatgaaataaaaggatgcacacatagtgacatgctaatcactataatgtgggcatcaaagttgtgtgttatgtgtaattactagttatctgaataaaagagaaagagatcatccatatttcttatcctaaatgaatgtcacgtgtctttataattctttgatgaaccagatgcatttcattaaccaaatccatatacatataaatattaatcatatataattaatatcaattgggttagcaaaacaaatctagtctaggtgtgttttgcgaattgcggcgcccttactttaacgcctctaaccaacacccctttatctttataaggaacaataaacagaatttgccccactgttctaaatcacctaataatatccccagctaaaaacaataaaggtttcctagaattaagacaagcatgactgttcctccaggagggtttggaacattgttgcagtcttgcagatacgggcgaagggtgagaaacagagcggagggctggaggtgacctcggtagtcgacgccggagttgagcttgacaacgacggggcggcccctgatggacttgaggaagtccgatggcgtcttcaccgtcccgccggcgcccgaggcgggcctgtcgctgccgccgccgccgctgctcatcttgcgcgctgtgcccccggcggtgtccctgtgttgcggatcgcgggtgggccaggtggatgcgagggcgacccgtttggactccggccggagccgccggatccctggtcggtgtcagtgccgtttactctgggccccacgtgtcagtaccgtctgtagatgacaacaacccgtcgtccacagtcatgtccaaaatatcctttcttcttttttttcgattcggatatctatcttccttttttttttccaaaaatcttcttgacgcaccagcgcgcacgtttgtggtaaacgccgacacgtcggtcccacgtcgatagaccccacccaccagtgagtagcgtgtacgtattcgggggtgacggacgtgtcgccgtcgtcttgctagtcccattcccatctgagccacacatctctgaacaaaaaaaaggagggaggcctccacgcacatccccctccgtgccacccgccccaaaccctcgcgccgcctccgagacagccgccgcaaccatggccaccgccgccgccgcgtctaccgcgctcactggcgccactaccgctgcgcccaaggcgaggcgccgggcgcacctcctggccacccgccgcgccctcgccgcgcccatcaggtgctcagcggcgtcacccgccatgccgatggctcccccggccaccccgctccggccgtggggccccaccgagccccgcaagggtgctgacatcctcgtcgagtccctcgagcgctgcggcgtccgcgacgtcttcgcctaccccggcggcgcgtccatggagatccaccaggcactcacccgctcccccgtcatcgccaaccacctcttccgccacgagcaaggggaggcctttgccgcctccggctacgcgcgctcctcgggccgcgtcggcgtctgcatcgccacctccggccccggcgccaccaacctagtctccgcgctcgccgacgcgctgctcgattccgtccccatggtcgccatcacgggacaggtggcgcgacgcatgattggcaccgacgccttccaggagacgcccatcgtcgaggtcacccgctccatcaccaagcacaactacctggtcctcgacgtcgacgacatcccccgcgtcgtgcaggaggctttcttcctcgcctcctctggtcgaccagggccggtgcttgtcgacatccccaaggacatccagcagcagatggcggtgcctgtctgggacaagcccatgagtctgcctgggtacattgcgcgccttcccaagccccctgcgactgagttgcttgagcaggtgctgcgtcttgttggtgaatcgcggcgccctgttctttatgtgggcggtggctgcgcagcatctggtgaggagttgcgacgctttgtggagctgactggaatcccggtcacaactactcttatgggcctcggcaacttccccagcgacgacccactgtctctgcgcatgctaggtatgcatgggacggtgtatgcaaattatgcagtggataaggccgatctgttgcttgcacttggtgtgcggtttgatgatcgcgtgacagggaagattgaggcttttgcaagcagggctaagattgtgcacgttgatattgatccggctgagattggcaagaacaagcagccacatgtgtccatctgtgcagatgttaagcttgctttgcagggcatgaatgctcttcttgaaggaagcacatcaaagaagagctttgactttggctcatggaacgatgagttggatcagcagaagagggaattcccccttgggtataaaacatctaatgaggagatccagccacaatatgctattcaggttcttgatgagctgacgaaaggcgaggccatcatcggcacaggtgttgggcagcaccagatgtgggcggcacagtactacacttacaagcggccaaggcagtggttgtcttcagctggtcttggggctatgggatttggtttgccggctgctgctggtgcttctgtggcaaacccaggtgtcactgttgttgacatcgatggagatggtagctttctcatgaacgttcaggagctagctatgatccgaattgagaacctcccagtgaaggtctttgtgctaaacaaccagcacctggggatggtggtgcagttggaggacaggttctataaggccaacagagcgcacacatacttgggaaacccagagaatgaaagtgagatatatccagatttcgtgacgatcgccaaagggttcaacattccagcggtccgtgtgacaaagaagaacgaagtccgcgcagcgataaagaagatgctcgagactccagggccgtacctcttggatataatcgtcccacaccaggagcatgtgttgcctatgatccctagtggtggggctttcaaggatatgatcctggatggtgatggcaggactgtgtactgactagctagtcagttaacagatctgccagatcctcggtgtacaaataacccgtcttatcctatgagacgggccggcgtcagtgtgttctggaggaatttttatgtcagagcctttttctttgtgtgcttgatgtagatgccaagggaagcttattggctgttgaagcttgatgcaaaataaattatggaactctgttttttgtttatctaataataactagcaaatatgcttccattgcattgaaactaacagccttttgtgtttccaagttttattttgtgacaatgtcatctatttcaattagttgtggaatcggaaacttgcaggactaacttggaaactccaatccctcagcatcctggactttttcctggtgtaatccatgtagatattattttaatcatcattttagttctggaggtttttccatctccggttttgctcccctttcttcaaaaaaaaaaaaaaaatgccgtaggcgccgcaacgcccacctgttgttcaaactcatgggcacgagtggctcgaagattttatacaacaattgctgtagtttcaccgttgctggtgaagaagcatttttttaaaaaaatatagtggtattcattttaattagtttagttgtgcagcgagcaaaatttggacatgctctgctcggaatctgatcgacctagacacagattagcagcagtagctttgtcatctgttccaagagttgcgatctgatagaagaaaaaaaaaccttcccttcaatgtaaaaccgaaactaacaagaaagaagcacagtgccgtttaggcaagtatggagtacgtattaagcatgtagaaggccatgcatgaaccactaacaagaaagaagcgcagtgccattcaggcaagcataagcatgtagattggcatgcatgaacaactaacagtagatcgtctctggtctgattagaagttttttgggaagccaagaaatcatgtacaactggttccatctcaaattccgtggcaaaaagaggcctaagcaacatacctcgagtagatcacattcaagcttggtcacccggtccgtcaatattctgattccgatgacttcgtaggttcctagctcaagccgctcgtgtccaagcgtcacttacgattagctaatgattacggcatctaggaccgactagtggcgcgccgactagctagctaaggtaccgagctcgaattcattccgattaatcgtggcctcttgctcttcaggatgaagagctatgtttaaacgtgcaagcgctactagacaattcagtacattaaaaacgtccgcaatgtgttattaagttgtctaagcgtcaatttgtttacaccacaatatatcctgcca

SEQ ID NO: 277 - DNA, 25365 bp, synthetic construct
  misc_feature 1..25365: note = PHP100160
  source 1..25365: mol_type = other DNA
gtttacccgccaatatatcctgtcaaacactgcggccgcacttgaccgcggatggagccggagctgtggtgaggccatcgacgggaggtgggggagaacacagtctcagtgttctttgtgagtccgcaaggtttttagcttttctgtattaattaaggttgctgttggctgtagaatacggtcgtggaagagctgtatcggtagctactacgtaagctattatatactggaagtctggagctcgtcgatctccggtcgtcttcctccatttctcctcgtcttgctttgactgctgctaccatttgcttctgttttctgatgaagcatgccatgtcggccaccagtgtttgtgtggtttttgcagggaatggctttcaagtgctgtgattgaatggccctcgtcgtcctcggctgagctcacatggacgcgtcatgtgagtgagatatatgatcatatgatgagtggggttcgggtgagtgcgtacttgaagtaggatcccgctttcactcattcattcattggcctttaaaccgggaaattttcgcgaggagatggagggaagcaagcagggtgacgagtgcagagtgccgcgagcgctttgtcaaaaggcaccgccgtaggcaaaaaaatcaatggccctgactgactcgatggtagtactactgtagagactagagagggttgctccccatatcttcgtgtgacttttactccagcattgcatttccgtcattgagacgttaattaatagcagctttcgggacagatgactgtggccatgtttcgtcacggccgcttcgtgccagctgggggtactatagtactgtgattttgttagtaaaaactttcattaggccaccattgacgaccgggccttcgcttttgctgcgctaattaaccatttcccggcgaccgaagggaacatgaacatgccccgacacatgagggcatgaggactagtgttctccctgtcgttcgttgacttgactagtgatagtttaaacgctcttcaactggaagagcggttactaccggttcactagctagctgctaatcgagctagttaccctatgaggtgacatgaagcgctcacggttactatgacggttagcttcacgactgttggtggcagtagcgtacgacttagctatagttccggacttacccttaagataacttcgtatagcatacattatacgaagttatgggcccacgcgtgaagagcggttaccagagctggtcacctttgtccaccaagatggaactgtcttcggccagaatggccatctggattcagcaggcctagaaggccatttatcgctatcaactttgtatagaaaagttgggccgagctcggtacggccagaatggcccggaccgggttaccaagcggccgcacactgatagtttaaactgaaggcgggaaacgacaatctgatcatgagcggagaattaagggagtcacgttatgacccccgccgatgacgcgggacaagccgttttacgtttggaactgacagaaccgcaacgattgaaggagccactcagccgcgggtttctggagtttaatgagctaagcacatacgtcagaaaccattattgcgcgttcaaaagtcgcctaaggtcactatcagctagcaaatatttcttgtcaaaaatgctccactgacgttccataaattcccctcggtatccaattagagtctcatattcactcccatggcggccaatgcgggcggcggtggagcgggaggaggcagcggcagcggcagcgtggctgcgccggcggtgtgccgccccagcggctcgcggtggacgccgacgccggagcagatcaggatgctgaaggagctctactacggctgcggcatccggtcgcccagctcggagcagatccagcgcatcaccgccatgctgcggcagcacggcaagatcgagggcaagaacgtcttctactggttccagaaccacaaggcccgcgagcgccagaagcgccgcctcaccagcctcgacgtcaacgtgcccgccgccggcgcggccgacgccaccaccagccaactcggcgtcctctcgctgtcgtcgccgccgccttcaggcgcggcgcctccctcgcccaccctcggcttctacgccgccggcaatggcggcggatcggctgtgctgctggacacgagttccgactggggcagcagcggcgctgctatggccaccgagacatgcttcctgcaggactacatgggcgtgacggacacgggcagctcgtcgcagtggccacgcttctcgtcgtcggacacgataatggcggcggccgcggcgcgggcggcgacgacgcgggcgcccgagacgctccctctcttcccgacctgcggcgacgacggcggcagcggtagcagcagctacttgccgttctggggtgccgcgtccacaactgccggcgccacttcttccgttgcgatccaacagcaacaccagctgcaggagcagtacagcttttacagcaacagcaacagcacccagctggccggcaccggcaaccaagacgtatcggcaacagcagcagcagccgccgccctggagctgagcctcagctcatggtgctccccttaccctgctgcagggagtatgtgagagcaacgcgagctgccactgctcttcactgatgtctctggaatggaaggaggaggaagtgagaacagatcattcgacaaagcagcattagtccgttgatcggtggaagaccactcgtcagtgttgagttgaatgtttgatcaataaaatacggcaatgctgtaagggttgttttttatgccattgataatacactgtactgttcagttgttgaactctatttcttagccatgccaagtgcttttcttattttgaataacattacagcaaaaagttgaaagacaaaaaaaaaaacccccgaacagagtgctttgggtcccaagcttctttagactgtgttcggcgttccccctaaatttctccccctatatctcactcacttgtcacatcagcgttctctttccccctatatctccacgctctacagcagttccacctatatcaaacctctataccccaccacaacaatattatatactttcatcttcaactaactcatgtaccttccaatttttttctactaataattatttacgtgcacagaaacttagcaaggagagagagagcgggaatttaaatgctcggcgttaggcttttagtccgctaggtggctagaccgaggttaggacgctagttcactaggggcctagtggtgttttaagacgtcacggtcaccacgcgtggaccgaagcttgcatgcctgcatcactgactagctaaacagcggccgcatcgagcagctggcttgtggggaccagacaaaaaaggaatggtgcagaattgttaggcgcacctaccaaaagcatctttgcctttattgcaaagataaagcagattcctctagtacaagtggggaacaaaataacgtggaaaagagctgtcctgacagcccactcactaatgcgtatgacgaacgcagtgacgaccacaaaactcgagcaacgagatcatgagccaatcaaagaggagtgatgtagacctaaagcaataatggagccatgacgtaagggcttacgcccatacgaaataattaaaggctgatgtgacctgtcggtctctcagaacctttactttttatgtttggcgtgtatttttaaatttccacggcaatgacgatgtgaccgtcgacccactaaaacattgctttgtcaaaagctaaaaaagatgatgcccgacagccacttgtgtgaagcatgagaagccggtccctccactaagaaaattagtgaagcatcttccagtggtccctccactcacagctcaatcagtgagcaacaggacgaaggaaatgacgtaagccatgacgtctaatcccagggcccggtgaccaatcgaattagcttggcgcgtggaccgaagcttgcatgcctgcagtgcagcgtgacccggtcgtgcccctctctagagataatgagcattgcatgtctaagttataaaaaattaccacatattttttttgtcacacttgtttgaagtgcagtttatctatctttatacatatatttaaactttactctacgaataatataatctatagtactacaataatatcagtgttttagagaatcatataaatgaacagttagacatggtctaaaggacaattgagtattttgacaacaggactctacagttttatctttttagtgtgcatgtgttctcctttttttttgcaaatagcttcacctatataatacttcatccattttattagtacatccatttagggtttagggttaatggtttttatagactaatttttttagtacatctattttattctattttagcctctaaattaagaaaactaaaactctattttagtttttttatttaataatttagatataaaatagaataaaataaagtgactaaaaattaaacaaataccctttaagaaattaaaaaaactaaggaaacatttttcttgtttcgagtagataatgccagcctgttaaacgccgtcgacgagtctaacggacaccaaccagcgaaccagcagcgtcgcgtcgggccaagcgaagcagacggcacggcatctctgtcgctgcctctggacccctctcgagagttccgctccaccgttggacttgctccgctgtcggcatccagaaattgcgtggcggagcggcagacgtgagccggcacggcaggcggcctcctcctcctctcacggcaccggcagctacgggggattcctttcccaccgctccttcgctttcccttcctcgcccgccgtaataaatagacaccccctccacaccctctttccccaacctcgtgttgttcggagcgcacacacacacaaccagatctcccccaaatccacccgtcggcacctccgcttcaaggtacgccgctcgtcctcccccccccccctctctaccttctctagatcggcgttccggtccatgcatggttagggcccggtagttctacttctgttcatgtttgtgttagatccgtgtttgtgttagatccgtgctgctagcgttcgtacacggatgcgacctgtacgtcagacacgttctgattgctaacttgccagtgtttctctttggggaatcctgggatggctctagccgttccgcagacgggatcgatttcatgattttttttgtttcgttgcatagggtttggtttgcccttttcctttatttcaatatatgccgtgcacttgtttgtcgggtcatcttttcatgcttttttttgtcttggttgtgatgatgtggtctggttgggcggtcgttctagatcggagtagaattctgtttcaaactacctggtggatttattaattttggatctgtatgtgtgtgccatacatattcatagttacgaattgaagatgatggatggaaatatcgatctaggataggtatacatgttgatgcgggttttactgatgcatatacagagatgctttttgttcgcttggttgtgatgatgtggtgtggttgggcggtcgttcattcgttctagatcggagtagaatactgtttcaaactacctggtgtatttattaattttggaactgtatgtgtgtgtcatacatcttcatagttacgagtttaagatggatggaaatatcgatctaggataggtatacatgttgatgtgggttttactgatgcatatacatgatggcatatgcagcatctattcatatgctctaaccttgagtacctatctattataataaacaagtatgttttataattattttgatcttgatatacttggatgatggcatatgcagcagctatatgtggatttttttagcactgccttcatacgctatttatttgcttggtactgtttcttttgtcgatgctcaccctgttgtttggtgttacttctgcaggtcgactttaacttagcctaggatccatggccactgtgaacaactggctcgctttctccctctccccgcaggagctgccgccctcccagacgacggactccacactcatctcggccgccaccgccgaccatgtctccggcgatgtctgcttcaacatcccccaagattggagcatgaggggatcagagctttcggcgctcgtcgcggagccgaagctggaggacttcctcggcggcatctccttctccgagcagcatcacaaggccaactgcaacatgatacccagcactagcagcacagtttgctacgcgagctcaggtgctagcaccggctaccatcaccagctgtaccaccagcccaccagctcagcgctccacttcgcggactccgtaatggtggcttcctcggccggtgtccacgacggcggtgccatgctcagcgcggccgccgctaacggtgtcgctggcgctgccagtgccaacggcggcggcatcgggctgtccatgattaagaactggctgcggagccaaccggcgcccatgcagccgagggtggcggcggctgagggcgcgcaggggctctctttgtccatgaacatggcggggacgacccaaggcgctgctggcatgccacttctcgctggagagcgcgcacgggcgcccgagagtgtatcgacgtcagcacagggtggagccgtcgtcgtcacggcgccgaaggaggatagcggtggcagcggtgttgccggcgctctagtagccgtgagcacggacacgggtggcagcggcggcgcgtcggctgacaacacggcaaggaagacggtggacacgttcgggcagcgcacgtcgatttaccgtggcgtgacaaggcatagatggactgggagatatgaggcacatctttgggataacagttgcagaagggaagggcaaactcgtaagggtcgtcaagtctatttaggtggctatgataaagaggagaaagctgctagggcttatgatcttgctgctctgaagtactggggtgccacaacaacaacaaattttccagtgagtaactacgaaaaggagctcgaggacatgaagcacatgacaaggcaggagtttgtagcgtctctgagaaggaagagcagtggtttctccagaggtgcatccatttacaggggagtgactaggcatcaccaacatggaagatggcaagcacggattggacgagttgcagggaacaaggatctttacttgggcaccttcagcacccaggaggaggcagcggaggcgtacgacatcgcggcgatcaagttccgcggcctcaacgccgtcaccaacttcgacatgagccgctacgacgtgaagagcatcctggacagcagcgccctccccatcggcagcgccgccaagcgcctcaaggaggccgaggccgcagcgtccgcgcagcaccaccacgccggcgtggtgagctacgacgtcggccgcatcgcctcgcagctcggcgacggcggagccctggcggcggcgtacggcgcgcactaccacggcgccgcctggccgaccatcgcgttccagccgggcgccgccagcacaggcctgtaccacccgtacgcgcagcagccaatgcgcggcggcgggtggtgcaagcaggagcaggaccacgcggtgatcgcggccgcgcacagcctgcaggacctccaccacctgaacctgggcgcggccggcgcgcacgactttttctcggcagggcagcaggccgccgccgctgcgatgcacggcctgggtagcatcgacagtgcgtcgctcgagcacagcaccggctccaactccgtcgtctacaacggcggggtcggcgacagcaacggcgccagcgccgtcggcggcagtggcggtggctacatgatgccgatgagcgctgccggagcaaccactacatcggcaatggtgagccacgagcaggtgcatgcacgggcctacgacgaagccaagcaggctgctcagatggggtacgagagctacctggtgaacgcggagaacaatggtggcggaaggatgtctgcatgggggactgtcgtgtctgcagccgcggcggcagcagcaagcagcaacgacaacatggccgccgacgtcgggcatggcggcgcgcagctcttcagtgtctggaacgacacttaagcgtacctagtggtacctgacatcttatagtctgcaacctctcgtgtctgaattcctatctttatcaagtgttattgcttccacgactataggacagctttcgtcgaaagcttttgctcatgtgatctcgaaggattcatctagtctgatttttcgtgacttgtatcggttttattggattcatccaacatatatcaataaaaaatgagttgtgtttcctttcttcctagttcagttaaaattatttccctcctgcgcttgtgctgtaattgtctgtgtacctgttgtttgtgactgtgttagttcccttggatatgatttcgtatttgatatgtacatggagatagcttagcttcattattggagtatgaagttagtatgacatagtcactctcctggaaaattgacactgcaaaccatatttttattctgaaccacaaatcctagtcagtccgctggcatatgccgtccgtttgctgaatccagaacgtgggtttggagatgtacggctgagatgcctctatgcgaaggggatttcgtggtgaaacgagatgggagtagagcaacgcccgtggaagatgcttcaaacttccacacttttgagcaacgatcggcagtagtaaggtagacgatttcaagatcaaagcatatgaagataaacaacatcaacaacaaaatttgttggggttctatagagagaaacagagctacatacatacactgttttgtatctaccatctgagatgatgaaaagatgaaaaactaaagaatgccccggcgccaacgccaggacacgccgcgcgcgcgtcacccgagccatctcttgacccagccggcgctgtatatttacacacgttgcagcatcgatcaccacctgttcgatcgcgtcgccgtcaccggcgcgccgcgacttattgaactagtctagggcgcggctaacaacctagcttagattgccttgtctaaacccttaggctaacgcgccacggtaacccggtccgggcctagaaggccccagagctggtcaccccatacgattggaagcttcaagtttgtacaaaaaagcaggctccggccagagttacccggaccgaagcttgcatgcctgcagtgcagcgtgacccggtcgtgcccctctctagagataatgagcattgcatgtctaagttataaaaaattaccacatattttttttgtcacacttgtttgaagtgcagtttatctatctttatacatatatttaaactttactctacgaataatataatctatagtactacaataatatcagtgttttagagaatcatataaatgaacagttagacatggtctaaaggacaattgagtattttgacaacaggactctacagttttatctttttagtgtgcatgtgttctcctttttttttgcaaatagcttcacctatataatacttcatccattttattagtacatccatttagggtttagggttaatggtttttatagactaatttttttagtacatctattttattctattttagcctctaaattaagaaaactaaaactctattttagtttttttatttaataatttagatataaaatagaataaaataaagtgactaaaaattaaacaaataccctttaagaaattaaaaaaactaaggaaacatttttcttgtttcgagtagataatgccagcctgttaaacgccgtcgacgagtctaacggacaccaaccagcgaaccagcagcgtcgcgtcgggccaagcgaagcagacggcacggcatctctgtcgctgcctctggacccctctcgagagttccgctccaccgttggacttgctccgctgtcggcatccagaaattgcgtggcggagcggcagacgtgagccggcacggcaggcggcctcctcctcctctcacggcaccggcagctacgggggattcctttcccaccgctccttcgctttcccttcctcgcccgccgtaataaatagacaccccctccacaccctctttccccaacctcgtgttgttcggagcgcacacacacacaaccagatctcccccaaatccacccgtcggcacctccgcttcaaggtacgccgctcgtcctcccccccccccctctctaccttctctagatcggcgttccggtccatgcatggttagggcccggtagttctacttctgttcatgtttgtgttagatccgtgtttgtgttagatccgtgctgctagcgttcgtacacggatgcgacctgtacgtcagacacgttctgattgctaacttgccagtgtttctctttggggaatcctgggatggctctagccgttccgcagacgggatcgatttcatgattttttttgtttcgttgcatagggtttggtttgcccttttcctttatttcaatatatgccgtgcacttgtttgtcgggtcatcttttcatgcttttttttgtcttggttgtgatgatgtggtctggttgggcggtcgttctagatcggagtagaattctgtttcaaactacctggtggatttattaattttggatctgtatgtgtgtgccatacatattcatagttacgaattgaagatgatggatggaaatatcgatctaggataggtatacatgttgatgcgggttttactgatgcatatacagagatgctttttgttcgcttggttgtgatgatgtggtgtggttgggcggtcgttcattcgttctagatcggagtagaatactgtttcaaactacctggtgtatttattaattttggaactgtatgtgtgtgtcatacatcttcatagttacgagtttaagatggatggaaatatcgatctaggataggtatacatgttgatgtgggttttactgatgcatatacatgatggcatatgcagcatctattcatatgctctaaccttgagtacctatctattataataaacaagtatgttttataattattttgatcttgatatacttggatgatggcatatgcagcagctatatgtggatttttttagccctgccttcatacgctatttatttgcttggtactgtttcttttgtcgatgctcaccctgttgtttggtgttacttctgcaggtcgactttaacttagcctaggatccatggcctcttcatctgcacccaggttccgtgtctattccaagtacctctttctaacatatcctgaatgtacccttgagccacagtacgccttggattcacttcgcactctcttgaacaaatatgagcccctctacatcgctgctgttagagagctccacgaagatggatcaccacatctgcacgttctcgtgcagaacaagcttcgtgcttccatcaccaatcccaatgccttaaacctccgtatggatacatctccattctccatattccatccaaatatacaagctgccaaagactgcaaccaagttcgtgattacatcacgaaggaggttgactccgatgtaaacacagctgagtggggaacattcgtggctgtttcaactccaggtcgtaaagaccgtgatgcggatatgaaacagatcattgaatctagttcctctcgcgaggaattcctcagcatggtttgcaatcgttttccgtttgaatggtctatccgtctcaaagacttcgagtacacggcacgccatctatttcctgacccagttgccacttacacacctgagtttccaaccgaatcactcatttgccatgagaccattgaaagctggaaaaatgaacatctctactctctgtccctcgagagctacatcctgtgcaccagcacccctgccgaccaggcccagtccgacctcgaatggatggacgactacagccgtagtcaccggggaggcataagtccatctacatctgcgggccaaccagaacaggaaagacttcctgggcaaggtctctagggtaccgttaacagatctactaactatctatactgtaataatgttgtatagccgccggatagctagctagtttagtcattcagcggcgatgggtaataataaagtgtcatccatccatcaccatgcgtggcaacgtgagcaatgacctgattgaacaaattgaaatgaaaagaagaaatatgttatatgtcaacgagatttcctcataatgccactgacgacgtgtgtccaagaaatgtatcagtgatacgtatattcacaatttttttatgacttatactcacaatttgtttttttactacttatactcacaatttgttgtgcgtaccataacaatttcgatcgaatatatatcagaaagttgacgaaagtaagctcactcaaaaagttaaatgggctgcggaagctgcgtcaggcccaagttttggctattctatccggtatccacgattttgatggctgagggacatatgttcgcttaagcttcggtccgggcctagaaggccgatctcccgggcacccagctttcttgtacaaagtggccgttaacggatcggccagaatggcccggaccgggttaccccgcggttcaaagccaatgactgttgttaggtccagtttctaaggacgaatcatccaatcactggttctttctgaacaaaacaaagagctatagagttacgttactgtagccgagacagagcctgcaatctggttatgccacatactaggttctttcttaaagttgactcactctatcctaagttctacttacaaggagctacaacaaattggtcataaccggagagcgttcaaggaggtaatatcccatcttactctgtagcaaggctacaaaaggagagctaaagaactaggctacaaaaagagagctaaagaactaactatctagcaagactacagagctatagtgtagagatttcataaccggtgagcgttcaaggatactttgaagagaagaggtaatatctcaactagcaagactacaaaaaaatggagatataaaactaactgtctaacaagactacagagctatagtagagatagatacgttcgacacttaagcatgagaattcgagctcggtaccctggttcacaaactcaatacaacacacagtggagtagggtattacgctccggcggcccgaaccactctaaatccttgtgtcctcgtgtgctcttccaccattaatgactgtaattgcagggacacgaagagttgtagcgcttttgccaacaagatccgctatatgctagtagagtggaacctgcacagcaacaagcatccaataatctgagaataagaattatgtgtggtgatggttctcatctctgcaactcgccattttcgcgagagaaccaaatccaagttggtgaagatcatgatttgggctcatgggctggcatagtagctattacctttgcaattgtggttcgaatctatccgatattctccttttcagggagagctaatgcttatgcttattgggtattttggtttgacactgcttcacgcccaaaaaaaggcaactatgtctgagttggatatggcccaaaaaaaggcagctatgtctgagttggatatggaagtcttctttcgtttagggtgaagtaagaccaagctcatgagcttattatcttaggtcggaacaaattagttgataggcatggcacatttatcaaattataatgattttaacagaaaagcaacacctctttttcagcagcaccagctttgcaagctgcaattgacactccaagcatagtatttgctccaaactcagcctgcatttcgcacaatatcatatctatttccatttggataaaatatattttccagaaatatgggaacagaatcaagatacagaaaaaagttgtggtagtagtggtaagtggaaacacaagtacagtgaaaagatagcattatttctgaacagtcaaattaaccgaaataagtagtatcacatactgcccctaaattgactacacccaatgtaaagaattgcttgagcatattgagccatcagttgtttgtttgtgtaacggatttgacaatgcagagttcaggagcaaaaaaccgcaaaggagagaaagagggaaaggatctcctagtatcccaccttgtggcgcgccctgtcaagtgcatgatggcctggtcgatctgcgtctgctgctgcggttccatcccaacgagtgcctccgacaccttgtcgttgatcacccgcaccgcgtaggcgacccccctggcgaggaacttccgcctctcggaggccccggccgcgtcggcggcggcgccctcgagcgcgcccacgctagccgtagatgctcggtgcacggccttgttggtgtgcaactcgacctcaacggccggtgcgctacgcccgtcaaggatctggcgcgcccgcaccctcgtgatcacggtgggcgcctcccgcctcatgtggccgacgatgaaaagcgccgggttaggggccttggcgcgcaccgccgtattcagggcctcctcgctcttgcgcgagagcaggtgcttccccaggtactcctgcactgacaaggctgccacagcggtggaatttgtcctcacgacttcgccacgtcgtcctcacctccctggcttcccacgactccgccgtatcgaggtgctcggtgggtcgtcttaatccgaagtccgaactaggaagacgagacagagaggtctgaggaatgggcctcgtttgatgttgagctgaattatttttccagcataagcccaggtcttggtccatgaacaaaattactagaaacccagcccagtactacgatctaaaagagggactgccactggatagctctctctagcattctccacgctccaatacagcggcgtcgtgtctatccgggtctatccgcgaacacgtgagaactctccagaaactgctttctcctccacttcatctctctcgctttccctctataaaaagaccccttctaggaattgagggagacagcaagcaccaagcagcgatccgaagctcaatcaattcactcaaacctcttccccaaatcttcgattagatcttcgttgacaagaagactagaaccgaacctgacatgtccaacctgctcacggttcaccagaaccttccggctcttccagtggacgcgacgtccgatgaagtcaggaagaacctcatggacatgttccgcgacaggcaagcgttcagcgagcacacctggaagatgctgctctccgtctgccgctcctgggctgcatggtgcaagctgaacaacaggaagtggttccccgctgagcccgaggacgtgagggattaccttctgtacctgcaagcgcgaggtttgtttctgcttctacctttgatatatatataataattatcattaattagtagtaatataatatttcaaatatttttttcaaaataaaagaatgtagtatatagcaattgcttttctgtagtttataagtgtgtatattttaatttataacttttctaatatatgaccaaaacatggtgatgcctaggtctggcagtgaagaccatccagcaacaccttggacaactgaacatgcttcacaggcgctccggcctcccgcgccccagcgactcgaacgccgtgagcctcgtcatgcgccgcatcaggaaggaaaacgtcgatgccggcgaaagggcaaagcaggccctcgcgttcgagaggaccgatttcgaccaggtccgcagcctgatggagaacagcgacaggtgccaggacattaggaacctggcgttcctcggaattgcatacaacacgctcctcaggatcgcggaaattgcccgcattcgcgtgaaggacattagccgcaccgacggcggcaggatgcttatccacattggcaggaccaagacgctcgtttccaccgcaggcgtcgaaaaggccctcagcctcggagtgaccaagctcgtcgaacgctggatctccgtgtccggcgtcgcggacgacccaaacaactacctcttctgccgcgtccgcaagaacggggtggctgcccctagcgccaccagccaactcagcacgagggccttggaaggtattttcgaggccacccaccgcctgatctacggcgcgaaggatgacagcggtcaacgctacctcgcatggtccgggcactccgcccgcgttggagctgctagggacatggcccgcgccggtgtttccatccccgaaatcatgcaggcgggtggatggacgaacgtgaacattgtcatgaactacattcgcaaccttgacagcgagacgggcgcaatggttcgcctcctggaagatggtgactgaggtacccaacctagacttgtccatcttctggattggccaacttaattaatgtatgaaataaaaggatgcacacatagtgacatgctaatcactataatgtgggcatcaaagttgtgtgttatgtgtaattactagttatctgaataaaagagaaagagatcatccatatttcttatcctaaatgaatgtcacgtgtctttataattctttgatgaaccagatgcatttcattaaccaaatccatatacatataaatattaatcatatataattaatatcaattgggttagcaaaacaaatctagtctaggtgtgttttgcgatccgatatcgaattggccacggtaccagctgctgctgttctagggttcacaagtctgcctatttgtcttccccaatggagctatggttgtctggtctggtccttggtcgtgtcccgtttcattgtgtactatttacctgtaatgtgtatccttaagtctggtttgatggtgtctgaaacgttttgctgtggtagagcagcatggaagaactataatgaataagtgatccctaatcattgtgtccaaattttgcttctgctatacccttttgtgctgtttcttatgttttgcttaaaaatttgatctgacaaacaaatttgtctaaattatgctcttgttctgactgtgtactgtacacatttgtattgctaccggtttggcacatagttttctctttgattgcagatcaaacccttctgattgcagattgcttggctatggctgatgtgctcactgttcttctttagcttgtatattgctgatggtggcttggctacggctgaaaaagttgctgctgcgccgacttggcaactgttgctccagtaatgctttgtcctctcttcctagccgccgacttggcacttggcagctgttgctcctgtaatgcgttgttatctcttatctcttgagatgtactatgattttgaggctgtttgacttgtgccagattgccagtgctgatgctatattatctcaggtttttatgctagtatatgttttactgtgtgctgcctgtgtcgagttacgtaatctattgaaccgctatgcgtgttgatgccctgttgttgcttgccagattgatgcccctgttgcttgcagcttgcaagctgtagtgaaatcctaaaattccaaaccaaatctattctgaacttttgaagatctgtgatgtccggaagaaaagattcaaacagataaacgggactctccagaatctataaaataaatgatcgacaaacgctttgctttggtaggcttcaagcttggtcacccggtccgggcctagaaggccagcttcggccgccccgggcaactttattatacaaagttgatagataaatcagatatctggttcctaaggacccggcggaccgattaaactgattcggtccgacgcgttacctaataacttcgtatagcatacattatacgaagttattagctaactaactagtaagcttaagccatgggtcgacggatccgttaactagcgtggcatttggcaccgccgcacactatgcgagctaggagtgctagtttacagatgaaactatgaaaccaagaaaacacaattgtccgtagctagcgcgtggcgtcgtgtcaagcttcacacagtatcttcgttcttcactataaatcgcgcctgttgttcgtgagacccaccaccgtggataacagtcccctaataataagcgatcaacagcactgctgatggctgaacaccgaggcgccgccgcgcgtaaccatccgccggagcagcccgtcgtgccggcgaacgacgccttccccgaccgcgcccagcagctctgcctcgacgccgggcgcgcgctcgcgatgtgcggcgtgctcgtcgccgtccctcccgcattttacgcgtcgacgtcgcggacgacaccgcacttgccttcgtcggcttcgtcctctggatcatcggtgcgtggctgtgcctcctggcgctcacgcccttggctccacgggcggtgagggcgggcggggccgccgccagcaccttgctgatcaggtgcctgtccctttcatgaactactagcgcccgcgcccgcggccgccgggcacaagagaacacatcgatgttcgctgcgtacgtcagcaataaggcactctttgtcagtagtcgagtgcatatgttgggtgtttgccctgggagatttcaagtgttgtggccattatcccgcaggataaaaaatcggcggcttttggattgatacggaaaataacgatgtttcatgctcgtgttgtgtgtgtgacatcttgtcagccaagtttttaaccgttgctactccccctctgtgggctcagtgtgtggaccggaatacgtcgtacataggccgtagcctaagcccaatatgccgtttttcaggttggcctgtgtgacgacaagcgggtctcaaaagcccatcacgcaactggcctgcaattattggaggagagcgcgtcgagttggttccagaggctgcgtggtggggccggactctgcgacgacctctcgttcgcgtccgatttggttgccgtgagccgtgacgtaacgcctccttccgttcctccctatataagttccacccccgggtccggtttccccaagccccagtgacccccgatcccgatcgcgaaatctccgcacccgccggcaagggaccgaagcaagcctctctcccgaccgtcgcatcaaggtacgcgtccgctcgatctgtcctcttccttctcgatttgacttgctgtggtgcccgatcacgggatcagaatcgcaccagtgtagatttcgcatgttctaagatgtgttagtttccaggctaatccagttctcttgacgcccgatccgatcgagctccgtgtttatttcagcctaatcgtagtattcccctaaaatttcctcattagggggttcgcaagattgttggtcgacaggttcacttatgctcgatcgcttacttttagtcgattcatgctgcgtactattgttgccccccgtggttttatcttttctcgtgtgaaatccagtagatatagtagatatcgtagcattaggttttaattcaatcgattgattattgtatcatcaaaattgagaagttcgaatcatgcctatcatgctgcctcaaccgaaatcctgtatattgaagtttcaattcaattgattgatcattcattagattcaaccaaaatctagaaggttagatgacgcatgtcatgctgcctgcgtagtttacctttgatctgtttatgattaccttatcagtaggatatttgtgattttgggaagtagcactaactgattcatgctgacatgatgttccctttcagattatactgttgagtcctatctaattgatgctttgtatgctatatgaatacgtcatggtaaattagcagttaattagcatattagcaattgggcgtacctcatcaggattgctcttgtagatgtgtgtggtgatgtttcttgttcaattcatgttctgctttaaaagtatgtgttctctgtttgttaattaagattcatggttataatgatttggacctaattaatcagggttgcccttttagatgcgtggttacttgttgagttcatttttttcctgctatagttgtatgcgtttgttcattcatggttagatttgatttgtttcttctctattccatgccttccatatacttcaattgtagcttaacatgagatttctgtatatgcaggtcgaccgccggggatccacacgacaccatggcccagtccaagcacggcctgaccaaggagatgaccatgaagtaccgcatggagggctgcgtggacggccacaagttcgtgatcaccggcgagggcatcggctaccccttcaagggcaagcaggccatcaacctgtgcgtggtggagggcggccccttgcccttcgccgaggacatcttgtccgccgccttcatgtacggcaaccgcgtgttcaccgagtacccccaggacatcgtcgactacttcaagaactcctgccccgccggctacacctgggaccgctccttcctgttcgaggacggcgccgtgtgcatctgcaacgccgacatcaccgtgagcgtggaggagaactgcatgtaccacgagtccaagttctacggcgtgaacttccccgccgacggccccgtgatgaagaagatgaccgacaactgggagccctcctgcgagaagatcatccccgtgcccaagcagggcatcttgaagggcgacgtgagcatgtacctgctgctgaaggacggtggccgcttgcgctgccagttcgacaccgtgtacaaggccaagtccgtgccccgcaagatgcccgactggcacttcatccagcacaagctgacccgcgaggaccgcagcgacgccaagaaccagaagtggcacctgaccgagcacgccatcgcctccggctccgccttgccctccggactcagatctcgatagagtcaacctagacttgtccatcttctggattggccaacttaattaatgtatgaaataaaaggatgcacacatagtgacatgctaatcactataatgtgggcatcaaagttgtgtgttatgtgtaattactagttatctgaataaaagagaaagagatcatccatatttcttatcctaaatgaatgtcacgtgtctttataattctttgatgaaccagatgcatttcattaaccaaatccatatacatataaatattaatcatatataattaatatcaattgggttagcaaaacaaatctagtctaggtgtgttttgcgaattgcggcgcccttactttaacgcctctaaccaacacccctttatctttataaggaacaataaacagaatttgccccactgttctaaatcacctaataatatccccagctaaaaacaataaaggtttcctagaattaagacaagcatgactgttcctccaggagggtttggaacattgttgcagtcttgcagatacgggcgaagggtgagaaacagagcggagggctggaggtgacctcggtagtcgacgccggagttgagcttgacaacgacggggcggcccctgatggacttgaggaagtccgatggcgtcttcaccgtcccgccggcgcccgaggcgggcctgtcgctgccgccgccgccgctgctcatcttgcgcgctgtgcccccggcggtgtccctgtgttgcggatcgcgggtgggccaggtggatgcgagggcgacccgtttggactccggccggagccgccggatccctggtcggtgtcagtgccgtttactctgggccccacgtgtcagtaccgtctgtagatgacaacaacccgtcgtccacagtcatgtccaaaatatcctttcttcttttttttcgattcggatatctatcttccttttttttttccaaaaatcttcttgacgcaccagcgcgcacgtttgtggtaaacgccgacacgtcggtcccacgtcgatagaccccacccaccagtgagtagcgtgtacgtattcgggggtgacggacgtgtcgccgtcgtcttgctagtcccattcccatctgagccacacatctctgaacaaaaaaaaggagggaggcctccacgcacatccccctccgtgccacccgccccaaaccctcgcgccgcctccgagacagccgccgcaaccatggccaccgccgccgccgcgtctaccgcgctcactggcgccactaccgctgcgcccaaggcgaggcgccgggcgcacctcctggccacccgccgcgccctcgccgcgcccatcaggtgctcagcggcgtcacccgccatgccgatggctcccccggccaccccgctccggccgtggggccccaccgagccccgcaagggtgctgacatcctcgtcgagtccctcgagcgctgcggcgtccgcgacgtcttcgcctaccccggcggcgcgtccatggagatccaccaggcactcacccgctcccccgtcatcgccaaccacctcttccgccacgagcaaggggaggcctttgccgcctccggctacgcgcgctcctcgggccgcgtcggcgtctgcatcgccacctccggccccggcgccaccaacctagtctccgcgctcgccgacgcgctgctcgattccgtccccatggtcgccatcacgggacaggtggcgcgacgcatgattggcaccgacgccttccaggagacgcccatcgtcgaggtcacccgctccatcaccaagcacaactacctggtcctcgacgtcgacgacatcccccgcgtcgtgcaggaggctttcttcctcgcctcctctggtcgaccagggccggtgcttgtcgacatccccaaggacatccagcagcagatggcggtgcctgtctgggacaagcccatgagtctgcctgggtacattgcgcgccttcccaagccccctgcgactgagttgcttgagcaggtgctgcgtcttgttggtgaatcgcggcgccctgttctttatgtgggcggtggctgcgcagcatctggtgaggagttgcgacgctttgtggagctgactggaatcccggtcacaactactcttatgggcctcggcaacttccccagcgacgacccactgtctctgcgcatgctaggtatgcatgggacggtgtatgcaaattatgcagtggataaggccgatctgttgcttgcacttggtgtgcggtttgatgatcgcgtgacagggaagattgaggcttttgcaagcagggctaagattgtgcacgttgatattgatccggctgagattggcaagaacaagcagccacatgtgtccatctgtgcagatgttaagcttgctttgcagggcatgaatgctcttcttgaaggaagcacatcaaagaagagctttgactttggctcatggaacgatgagttggatcagcagaagagggaattcccccttgggtataaaacatctaatgaggagatccagccacaatatgctattcaggttcttgatgagctgacgaaaggcgaggccatcatcggcacaggtgttgggcagcaccagatgtgggcggcacagtactacacttacaagcggccaaggcagtggttgtcttcagctggtcttggggctatgggatttggtttgccggctgctgctggtgcttctgtggcaaacccaggtgtcactgttgttgacatcgatggagatggtagctttctcatgaacgttcaggagctagctatgatccgaattgagaacctcccagtgaaggtctttgtgctaaacaaccagcacctggggatggtggtgcagttggaggacaggttctataaggccaacagagcgcacacatacttgggaaacccagagaatgaaagtgagatatatccagatttcgtgacgatcgccaaagggttcaacattccagcggtccgtgtgacaaagaagaacgaagtccgcgcagcgataaagaagatgctcgagactccagggccgtacctcttggatataatcgtcccacaccaggagcatgtgttgcctatgatccctagtggtggggctttcaaggatatgatcctggatggtgatggcaggactgtgtactgactagctagtcagttaacagatctgccagatcctcggtgtacaaataacccgtcttatcctatgagacgggccggcgtcagtgtgttctggaggaatttttatgtcagagcctttttctttgtgtgcttgatgtagatgccaagggaagcttattggctgttgaagcttgatgcaaaataaattatggaactctgttttttgtttatctaataataactagcaaatatgcttccattgcattgaaactaacagccttttgtgtttccaagttttattttgtgacaatgtcatctatttcaattagttgtggaatcggaaacttgcaggactaacttggaaactccaatccctcagcatcctggactttttcctggtgtaatccatgtagatattattttaatcatcattttagttctggaggtttttccatctccggttttgctcccctttcttcaaaaaaaaaaaaaaaatgccgtaggcgccgcaacgcccacctgttgttcaaactcatgggcacgagtggctcgaagattttatacaacaattgctgtagtttcaccgttgctggtgaagaagcatttttttaaaaaaatatagtggtattcattttaattagtttagttgtgcagcgagcaaaatttggacatgctctgctcggaatctgatcgacctagacacagattagcagcagtagctttgtcatctgttccaagagttgcgatctgatagaagaaaaaaaaaccttcccttcaatgtaaaaccgaaactaacaagaaagaagcacagtgccgtttaggcaagtatggagtacgtattaagcatgtagaaggccatgcatgaaccactaacaagaaagaagcgcagtgccattcaggcaagcataagcatgtagattggcatgcatgaacaactaacagtagatcgtctctggtctgattagaagttttttgggaagccaagaaatcatgtacaactggttccatctcaaattccgtggcaaaaagaggcctaagcaacatacctcgagtagatcacattcaagcttggtcacccggtccgtcaatattctgattccgatgacttcgtaggttcctagctcaagccgctcgtgtccaagcgtcacttacgattagctaatgattacggcatctaggaccgactagtggcgcgccgactagctagctaaggtaccgagctcgaattcattccgattaatcgtggcctcttgctcttcaggatgaagagctatgtttaaacgtgcaagcgctactagacaattcagtacattaaaaacgtccgcaatgtgttattaagttgtctaagcgtcaatttgtttacaccacaatatatcctgcca

SEQ ID NO: 278 - DNA, 23204 bp, synthetic construct
  misc_feature 1..23204: note = PHP100229
  source 1..23204: mol_type = other DNA
gtttacccgccaatatatcctgtcaaacactgcggccgcacttgaccgcggatggagccggagctgtggtgaggccatcgacgggaggtgggggagaacacagtctcagtgttctttgtgagtccgcaaggtttttagcttttctgtattaattaaggttgctgttggctgtagaatacggtcgtggaagagctgtatcggtagctactacgtaagctattatatactggaagtctggagctcgtcgatctccggtcgtcttcctccatttctcctcgtcttgctttgactgctgctaccatttgcttctgttttctgatgaagcatgccatgtcggccaccagtgtttgtgtggtttttgcagggaatggctttcaagtgctgtgattgaatggccctcgtcgtcctcggctgagctcacatggacgcgtcatgtgagtgagatatatgatcatatgatgagtggggttcgggtgagtgcgtacttgaagtaggatcccgctttcactcattcattcattggcctttaaaccgggaaattttcgcgaggagatggagggaagcaagcagggtgacgagtgcagagtgccgcgagcgctttgtcaaaaggcaccgccgtaggcaaaaaaatcaatggccctgactgactcgatggtagtactactgtagagactagagagggttgctccccatatcttcgtgtgacttttactccagcattgcatttccgtcattgagacgttaattaatagcagctttcgggacagatgactgtggccatgtttcgtcacggccgcttcgtgccagctgggggtactatagtactgtgattttgttagtaaaaactttcattaggccaccattgacgaccgggccttcgcttttgctgcgctaattaaccatttcccggcgaccgaagggaacatgaacatgccccgacacatgagggcatgaggactagtgttctccctgtcgttcgttgacttgactagtgatagtttaaacgctcttcaactggaagagcggttactaccggttcactagctagctgctaatcgagctagttaccctatgaggtgacatgaagcgctcacggttactatgacggttagcttcacgactgttggtggcagtagcgtacgacttagctatagttccggacttacccttaagataacttcgtatagcatacattatacgaagttatgggcccacgcgtgaagagcggttaccagagctggtcacctttgtccaccaagatggaactgtcttcggccagaatggccatctggattcagcaggcctagaaggccatttatcgctatcaactttgtatagaaaagttgggccgaattcgagctcggtacggccagaatggcccggaccgaagcttgtcatgtgccatgagtttggttagcagatacatggctaatcctgatagaatgcattggaaagttgttaagtggattttcaagtacttatatggtacgtctaatgcttgtttgtagtttggcaagtcaaagagggacttgttggatatgttgattcagattatggagcagttttgtataagagaagatcattaatagattatgtattcacggttggtggatgtgtaattagctggagggtttgcctaattccgacagttgttttgtctactacagaggttgagtatattgcagcttgtgatgctagcaaataggtcgtttggttgaaaggtctatatgctgagttttatggagatacatattgcattacattgttctgtgacagttagagtgctatttgccttacaaaggattagatgtttcatgagaggataaagcacattgatattatcattatatatgggaaatagttgcaaaaggtaatttgagggtatgcaagattagtacacacttcaatccagcgatgactaaatctgttactgggtgctaagtttgagctttgctcgaacttagttggtataattgcttagccctagcggctatgttggcacgacattttgttccttctattatttagaaagttgcttacaaattttggctacaagatggaatttgtctcgaggtaagattgttgagtttgtgatccaaattctggataaggggtcgagttggtgagcgaagtggaggcccgtcgccagaggtttgagccgaccctaattagggtttctgttgcgccatcatcataaccatcttgtaagccgtcgtctaagtacgacgttctgtaaagactccaaattacagtgaaggtttcgtctgactggtatctgtggtttttcccttcgcagtgaaggattttctatgtaaatctatatgtcgtgatctgtaattgtggttgattacttcatttttatgcccgtcgactctgctaacaaatataaatttatgtttttactaagacttaaacatagttaagtattgctaacagaatataggaaaacgatgcttcattttgaaaaaataggaaaaataacacaaactgtataaggaagaaaaaaaatatatagttggatattgaagtaatagcgtagaccccattgccctaaacgaaaagcccaaactaaatatagattcattcggctccaatccaactcaatccagctcagaccaaccgcaactcaacccagcttttatataataatagaatcatcagtattatagctaaaaataaactaacagttacaaaactagtctatcaaacaagccgttactatatccactctttaactaggttagacccgtggatgcaccacaggccagacagttggcctaaatccggcacagctattgggccgatctggcccggacacgcttttagtcctgctagaccgtactcgtgccgggtcacagacctactgccgggcgaatccatttagatatgtgtacctgttaccccaactctagtcgtcggaaccccaaccgagttccccagtactccgcagtccgcacggccgcatccgtcaagatccgcgaagagcaacgaggcgaggcgaggggagggaaaacaagtgagtgagagagagagagagaggagggaaacccgggggatctcgactctagaggatcgctcaggaaggccgctgagatagaggcatggcggccaatgcgggcggcggtggagcgggaggaggcagcggcagcggcagcgtggctgcgccggcggtgtgccgccccagcggctcgcggtggacgccgacgccggagcagatcaggatgctgaaggagctctactacggctgcggcatccggtcgcccagctcggagcagatccagcgcatcaccgccatgctgcggcagcacggcaagatcgagggcaagaacgtcttctactggttccagaaccacaaggcccgcgagcgccagaagcgccgcctcaccagcctcgacgtcaacgtgcccgccgccggcgcggccgacgccaccaccagccaactcggcgtcctctcgctgtcgtcgccgccgccttcaggcgcggcgcctccctcgcccaccctcggcttctacgccgccggcaatggcggcggatcggctgtgctgctggacacgagttccgactggggcagcagcggcgctgccatggccaccgagacatgcttcctgcaggactacatgggcgtgacggacacgggcagctcgtcgcagtggccacgcttctcgtcgtcggacacgataatggcggcggccgcggcgcgggcggcgacgacgcgggcgcccgagacgctccctctcttcccgacctgcggcgacgacggcggcagcggtagcagcagctacttgccgttctggggtgccgcgtccacaactgccggcgccacttcttccgttgcgatccagcagcaacaccagctgcaggagcagtacagcttttacagcaacagcaacagcacccagctggccggcaccggcaaccaagacgtatcggcaacagcagcagcagccgccgccctggagctgagcctcagctcatggtgctccccttaccctgctgcagggagtatgtgagagcaacgcgagctgccactgctcttcactgatgtctctggaatggaaggaggaggaagtgagcatagcgttggtgcgttgctgtcaagggcgaattcacatggttaacctagacttgtccatcttctggattggccaacttaattaatgtatgaaataaaaggatgcacacatagtgacatgctaatcactataatgtgggcatcaaagttgtgtgttatgtgtaattactagttatctgaataaaagagaaagagatcatccatatttcttatcctaaatgaatgtcacgtgtctttataattctttgatgaaccagatgcatttcattaaccaaatccatatacatataaatattaatcatatataattaatatcaattgggttagcaaaacaaatctagtctaggtgtgttttgcgaatgcggccgccaccgcggtggagctcgaattccggtccgggcctagaaggccagcttcaagtttgtacaaaaaagcaggctccggccagaatctcactgactagctaaacagcggccgcatcgagcagctggcttgtggggaccagacaaaaaaggaatggtgcagaattgttaggcgcacctaccaaaagcatctttgcctttattgcaaagataaagcagattcctctagtacaagtggggaacaaaataacgtggaaaagagctgtcctgacagcccactcactaatgcgtatgacgaacgcagtgacgaccacaaaactcgagcaacgagatcatgagccaatcaaagaggagtgatgtagacctaaagcaataatggagccatgacgtaagggcttacgcccatacgaaataattaaaggctgatgtgacctgtcggtctctcagaacctttactttttatgtttggcgtgtatttttaaatttccacggcaatgacgatgtgaccgtcgacccactaaaacattgctttgtcaaaagctaaaaaagatgatgcccgacagccacttgtgtgaagcatgagaagccggtccctccactaagaaaattagtgaagcatcttccagtggtccctccactcacagctcaatcagtgagcaacaggacgaaggaaatgacgtaagccatgacgtctaatcccagggcccggtgaccaatcgaattagcttggcgcgtggaccgaagcttgcatgcctgcagtgcagcgtgacccggtcgtgcccctctctagagataatgagcattgcatgtctaagttataaaaaattaccacatattttttttgtcacacttgtttgaagtgcagtttatctatctttatacatatatttaaactttactctacgaataatataatctatagtactacaataatatcagtgttttagagaatcatataaatgaacagttagacatggtctaaaggacaattgagtattttgacaacaggactctacagttttatctttttagtgtgcatgtgttctcctttttttttgcaaatagcttcacctatataatacttcatccattttattagtacatccatttagggtttagggttaatggtttttatagactaatttttttagtacatctattttattctattttagcctctaaattaagaaaactaaaactctattttagtttttttatttaataatttagatataaaatagaataaaataaagtgactaaaaattaaacaaataccctttaagaaattaaaaaaactaaggaaacatttttcttgtttcgagtagataatgccagcctgttaaacgccgtcgacgagtctaacggacaccaaccagcgaaccagcagcgtcgcgtcgggccaagcgaagcagacggcacggcatctctgtcgctgcctctggacccctctcgagagttccgctccaccgttggacttgctccgctgtcggcatccagaaattgcgtggcggagcggcagacgtgagccggcacggcaggcggcctcctcctcctctcacggcaccggcagctacgggggattcctttcccaccgctccttcgctttcccttcctcgcccgccgtaataaatagacaccccctccacaccctctttccccaacctcgtgttgttcggagcgcacacacacacaaccagatctcccccaaatccacccgtcggcacctccgcttcaaggtacgccgctcgtcctcccccccccccctctctaccttctctagatcggcgttccggtccatgcatggttagggcccggtagttctacttctgttcatgtttgtgttagatccgtgtttgtgttagatccgtgctgctagcgttcgtacacggatgcgacctgtacgtcagacacgttctgattgctaacttgccagtgtttctctttggggaatcctgggatggctctagccgttccgcagacgggatcgatttcatgattttttttgtttcgttgcatagggtttggtttgcccttttcctttatttcaatatatgccgtgcacttgtttgtcgggtcatcttttcatgcttttttttgtcttggttgtgatgatgtggtctggttgggcggtcgttctagatcggagtagaattctgtttcaaactacctggtggatttattaattttggatctgtatgtgtgtgccatacatattcatagttacgaattgaagatgatggatggaaatatcgatctaggataggtatacatgttgatgcgggttttactgatgcatatacagagatgctttttgttcgcttggttgtgatgatgtggtgtggttgggcggtcgttcattcgttctagatcggagtagaatactgtttcaaactacctggtgtatttattaattttggaactgtatgtgtgtgtcatacatcttcatagttacgagtttaagatggatggaaatatcgatctaggataggtatacatgttgatgtgggttttactgatgcatatacatgatggcatatgcagcatctattcatatgctctaaccttgagtacctatctattataataaacaagtatgttttataattattttgatcttgatatacttggatgatggcatatgcagcagctatatgtggatttttttagcactgccttcatacgctatttatttgcttggtactgtttcttttgtcgatgctcaccctgttgtttggtgttacttctgcaggtcgactttaacttagcctaggatccatggccactgtgaacaactggctcgctttctccctctccccgcaggagctgccgccctcccagacgacggactccacactcatctcggccgccaccgccgaccatgtctccggcgatgtctgcttcaacatcccccaagattggagcatgaggggatcagagctttcggcgctcgtcgcggagccgaagctggaggacttcctcggcggcatctccttctccgagcagcatcacaaggccaactgcaacatgatacccagcactagcagcacagtttgctacgcgagctcaggtgctagcaccggctaccatcaccagctgtaccaccagcccaccagctcagcgctccacttcgcggactccgtaatggtggcttcctcggccggtgtccacgacggcggtgccatgctcagcgcggccgccgctaacggtgtcgctggcgctgccagtgccaacggcggcggcatcgggctgtccatgattaagaactggctgcggagccaaccggcgcccatgcagccgagggtggcggcggctgagggcgcgcaggggctctctttgtccatgaacatggcggggacgacccaaggcgctgctggcatgccacttctcgctggagagcgcgcacgggcgcccgagagtgtatcgacgtcagcacagggtggagccgtcgtcgtcacggcgccgaaggaggatagcggtggcagcggtgttgccggcgctctagtagccgtgagcacggacacgggtggcagcggcggcgcgtcggctgacaacacggcaaggaagacggtggacacgttcgggcagcgcacgtcgatttaccgtggcgtgacaaggcatagatggactgggagatatgaggcacatctttgggataacagttgcagaagggaagggcaaactcgtaagggtcgtcaagtctatttaggtggctatgataaagaggagaaagctgctagggcttatgatcttgctgctctgaagtactggggtgccacaacaacaacaaattttccagtgagtaactacgaaaaggagctcgaggacatgaagcacatgacaaggcaggagtttgtagcgtctctgagaaggaagagcagtggtttctccagaggtgcatccatttacaggggagtgactaggcatcaccaacatggaagatggcaagcacggattggacgagttgcagggaacaaggatctttacttgggcaccttcagcacccaggaggaggcagcggaggcgtacgacatcgcggcgatcaagttccgcggcctcaacgccgtcaccaacttcgacatgagccgctacgacgtgaagagcatcctggacagcagcgccctccccatcggcagcgccgccaagcgcctcaaggaggccgaggccgcagcgtccgcgcagcaccaccacgccggcgtggtgagctacgacgtcggccgcatcgcctcgcagctcggcgacggcggagccctggcggcggcgtacggcgcgcactaccacggcgccgcctggccgaccatcgcgttccagccgggcgccgccagcacaggcctgtaccacccgtacgcgcagcagccaatgcgcggcggcgggtggtgcaagcaggagcaggaccacgcggtgatcgcggccgcgcacagcctgcaggacctccaccacctgaacctgggcgcggccggcgcgcacgactttttctcggcagggcagcaggccgccgccgctgcgatgcacggcctgggtagcatcgacagtgcgtcgctcgagcacagcaccggctccaactccgtcgtctacaacggcggggtcggcgacagcaacggcgccagcgccgtcggcggcagtggcggtggctacatgatgccgatgagcgctgccggagcaaccactacatcggcaatggtgagccacgagcaggtgcatgcacgggcctacgacgaagccaagcaggctgctcagatggggtacgagagctacctggtgaacgcggagaacaatggtggcggaaggatgtctgcatgggggactgtcgtgtctgcagccgcggcggcagcagcaagcagcaacgacaacatggccgccgacgtcgggcatggcggcgcgcagctcttcagtgtctggaacgacacttaagcgtacctagtggtacctgacatcttatagtctgcaacctctcgtgtctgaattcctatctttatcaagtgttattgcttccacgactataggacagctttcgtcgaaagcttttgctcatgtgatctcgaaggattcatctagtctgatttttcgtgacttgtatcggttttattggattcatccaacatatatcaataaaaaatgagttgtgtttcctttcttcctagttcagttaaaattatttccctcctgcgcttgtgctgtaattgtctgtgtacctgttgtttgtgactgtgttagttcccttggatatgatttcgtatttgatatgtacatggagatagcttagcttcattattggagtatgaagttagtatgacatagtcactctcctggaaaattgacactgcaaaccatatttttattctgaaccacaaatcctagtcagtccgctggcatatgccgtccgtttgctgaatccagaacgtgggtttggagatgtacggctgagatgcctctatgcgaaggggatttcgtggtgaaacgagatgggagtagagcaacgcccgtggaagatgcttcaaacttccacacttttgagcaacgatcggcagtagtaaggtagacgatttcaagatcaaagcatatgaagataaacaacatcaacaacaaaatttgttggggttctatagagagaaacagagctacatacatacactgttttgtatctaccatctgagatgatgaaaagatgaaaaactaaagaatgccccggcgccaacgccaggacacgccgcgcgcgcgtcacccgagccatctcttgacccagccggcgctgtatatttacacacgttgcagcatcgatcaccacctgttcgatcgcgtcgccgtcaccggcgcgccgcgacttattgaactagtctagggcgcggctaacaacctagcttagattgccttgtctaaacccttaggctaacgcgccactctagaaggccgatctcccccgaacgcgccagatccgatatcgatgggccctggccgaagcttggtcacccggtccgggcctagaaggccgatctcccgggcacccagctttcttgtacaaagtggccgttaacggatcggccagaatggcccggaccgggttaccccgcggttcaaagccaatgactgttgttaggtccagtttctaaggacgaatcatccaatcactggttctttctgaacaaaacaaagagctatagagttacgttactgtagccgagacagagcctgcaatctggttatgccacatactaggttctttcttaaagttgactcactctatcctaagttctacttacaaggagctacaacaaattggtcataaccggagagcgttcaaggaggtaatatcccatcttactctgtagcaaggctacaaaaggagagctaaagaactaggctacaaaaagagagctaaagaactaactatctagcaagactacagagctatagtgtagagatttcataaccggtgagcgttcaaggatactttgaagagaagaggtaatatctcaactagcaagactacaaaaaaatggagatataaaactaactgtctaacaagactacagagctatagtagagatagatacgttcgacacttaagcatgagaattcgagctcggtaccctggttcacaaactcaatacaacacacagtggagtagggtattacgctccggcggcccgaaccactctaaatccttgtgtcctcgtgtgctcttccaccattaatgactgtaattgcagggacacgaagagttgtagcgcttttgccaacaagatccgctatatgctagtagagtggaacctgcacagcaacaagcatccaataatctgagaataagaattatgtgtggtgatggttctcatctctgcaactcgccattttcgcgagagaaccaaatccaagttggtgaagatcatgatttgggctcatgggctggcatagtagctattacctttgcaattgtggttcgaatctatccgatattctccttttcagggagagctaatgcttatgcttattgggtattttggtttgacactgcttcacgcccaaaaaaaggcaactatgtctgagttggatatggcccaaaaaaaggcagctatgtctgagttggatatggaagtcttctttcgtttagggtgaagtaagaccaagctcatgagcttattatcttaggtcggaacaaattagttgataggcatggcacatttatcaaattataatgattttaacagaaaagcaacacctctttttcagcagcaccagctttgcaagctgcaattgacactccaagcatagtatttgctccaaactcagcctgcatttcgcacaatatcatatctatttccatttggataaaatatattttccagaaatatgggaacagaatcaagatacagaaaaaagttgtggtagtagtggtaagtggaaacacaagtacagtgaaaagatagcattatttctgaacagtcaaattaaccgaaataagtagtatcacatactgcccctaaattgactacacccaatgtaaagaattgcttgagcatattgagccatcagttgtttgtttgtgtaacggatttgacaatgcagagttcaggagcaaaaaaccgcaaaggagagaaagagggaaaggatctcctagtatcccaccttgtggcgcgccctgtcaagtgcatgatggcctggtcgatctgcgtctgctgctgcggttccatcccaacgagtgcctccgacaccttgtcgttgatcacccgcaccgcgtaggcgacccccctggcgaggaacttccgcctctcggaggccccggccgcgtcggcggcggcgccctcgagcgcgcccacgctagccgtagatgctcggtgcacggccttgttggtgtgcaactcgacctcaacggccggtgcgctacgcccgtcaaggatctggcgcgcccgcaccctcgtgatcacggtgggcgcctcccgcctcatgtggccgacgatgaaaagcgccgggttaggggccttggcgcgcaccgccgtattcagggcctcctcgctcttgcgcgagagcaggtgcttccccaggtactcctgcactgacaaggctgccacagcggtggaatttgtcctcacgacttcgccacgtcgtcctcacctccctggcttcccacgactccgccgtatcgaggtgctcggtgggtcgtcttaatccgaagtccgaactaggaagacgagacagagaggtctgaggaatgggcctcgtttgatgttgagctgaattatttttccagcataagcccaggtcttggtccatgaacaaaattactagaaacccagcccagtactacgatctaaaagagggactgccactggatagctctctctagcattctccacgctccaatacagcggcgtcgtgtctatccgggtctatccgcgaacacgtgagaactctccagaaactgctttctcctccacttcatctctctcgctttccctctataaaaagaccccttctaggaattgagggagacagcaagcaccaagcagcgatccgaagctcaatcaattcactcaaacctcttccccaaatcttcgattagatcttcgttgacaagaagactagaaccgaacctgacatgtccaacctgctcacggttcaccagaaccttccggctcttccagtggacgcgacgtccgatgaagtcaggaagaacctcatggacatgttccgcgacaggcaagcgttcagcgagcacacctggaagatgctgctctccgtctgccgctcctgggctgcatggtgcaagctgaacaacaggaagtggttccccgctgagcccgaggacgtgagggattaccttctgtacctgcaagcgcgaggtttgtttctgcttctacctttgatatatatataataattatcattaattagtagtaatataatatttcaaatatttttttcaaaataaaagaatgtagtatatagcaattgcttttctgtagtttataagtgtgtatattttaatttataacttttctaatatatgaccaaaacatggtgatgcctaggtctggcagtgaagaccatccagcaacaccttggacaactgaacatgcttcacaggcgctccggcctcccgcgccccagcgactcgaacgccgtgagcctcgtcatgcgccgcatcaggaaggaaaacgtcgatgccggcgaaagggcaaagcaggccctcgcgttcgagaggaccgatttcgaccaggtccgcagcctgatggagaacagcgacaggtgccaggacattaggaacctggcgttcctcggaattgcatacaacacgctcctcaggatcgcggaaattgcccgcattcgcgtgaaggacattagccgcaccgacggcggcaggatgcttatccacattggcaggaccaagacgctcgtttccaccgcaggcgtcgaaaaggccctcagcctcggagtgaccaagctcgtcgaacgctggatctccgtgtccggcgtcgcggacgacccaaacaactacctcttctgccgcgtccgcaagaacggggtggctgcccctagcgccaccagccaactcagcacgagggccttggaaggtattttcgaggccacccaccgcctgatctacggcgcgaaggatgacagcggtcaacgctacctcgcatggtccgggcactccgcccgcgttggagctgctagggacatggcccgcgccggtgtttccatccccgaaatcatgcaggcgggtggatggacgaacgtgaacattgtcatgaactacattcgcaaccttgacagcgagacgggcgcaatggttcgcctcctggaagatggtgactgaggtacccaacctagacttgtccatcttctggattggccaacttaattaatgtatgaaataaaaggatgcacacatagtgacatgctaatcactataatgtgggcatcaaagttgtgtgttatgtgtaattactagttatctgaataaaagagaaagagatcatccatatttcttatcctaaatgaatgtcacgtgtctttataattctttgatgaaccagatgcatttcattaaccaaatccatatacatataaatattaatcatatataattaatatcaattgggttagcaaaacaaatctagtctaggtgtgttttgcgatccgatatcgaattggccacggtaccagctgctgctgttctagggttcacaagtctgcctatttgtcttccccaatggagctatggttgtctggtctggtccttggtcgtgtcccgtttcattgtgtactatttacctgtaatgtgtatccttaagtctggtttgatggtgtctgaaacgttttgctgtggtagagcagcatggaagaactataatgaataagtgatccctaatcattgtgtccaaattttgcttctgctatacccttttgtgctgtttcttatgttttgcttaaaaatttgatctgacaaacaaatttgtctaaattatgctcttgttctgactgtgtactgtacacatttgtattgctaccggtttggcacatagttttctctttgattgcagatcaaacccttctgattgcagattgcttggctatggctgatgtgctcactgttcttctttagcttgtatattgctgatggtggcttggctacggctgaaaaagttgctgctgcgccgacttggcaactgttgctccagtaatgctttgtcctctcttcctagccgccgacttggcacttggcagctgttgctcctgtaatgcgttgttatctcttatctcttgagatgtactatgattttgaggctgtttgacttgtgccagattgccagtgctgatgctatattatctcaggtttttatgctagtatatgttttactgtgtgctgcctgtgtcgagttacgtaatctattgaaccgctatgcgtgttgatgccctgttgttgcttgccagattgatgcccctgttgcttgcagcttgcaagctgtagtgaaatcctaaaattccaaaccaaatctattctgaacttttgaagatctgtgatgtccggaagaaaagattcaaacagataaacgggactctccagaatctataaaataaatgatcgacaaacgctttgctttggtaggcttcaagcttggtcacccggtccgggcctagaaggccagcttcggccgccccgggcaactttattatacaaagttgatagataaatcagatatctggttcctaaggacccggcggaccgattaaactgattcggtccgacgcgttacctaataacttcgtatagcatacattatacgaagttattagctaactaactagtaagcttaagccatgggtcgacggatccgttaactagcgtggcatttggcaccgccgcacactatgcgagctaggagtgctagtttacagatgaaactatgaaaccaagaaaacacaattgtccgtagctagcgcgtggcgtcgtgtcaagcttcacacagtatcttcgttcttcactataaatcgcgcctgttgttcgtgagacccaccaccgtggataacagtcccctaataataagcgatcaacagcactgctgatggctgaacaccgaggcgccgccgcgcgtaaccatccgccggagcagcccgtcgtgccggcgaacgacgccttccccgaccgcgcccagcagctctgcctcgacgccgggcgcgcgctcgcgatgtgcggcgtgctcgtcgccgtccctcccgcattttacgcgtcgacgtcgcggacgacaccgcacttgccttcgtcggcttcgtcctctggatcatcggtgcgtggctgtgcctcctggcgctcacgcccttggctccacgggcggtgagggcgggcggggccgccgccagcaccttgctgatcaggtgcctgtccctttcatgaactactagcgcccgcgcccgcggccgccgggcacaagagaacacatcgatgttcgctgcgtacgtcagcaataaggcactctttgtcagtagtcgagtgcatatgttgggtgtttgccctgggagatttcaagtgttgtggccattatcccgcaggataaaaaatcggcggcttttggattgatacggaaaataacgatgtttcatgctcgtgttgtgtgtgtgacatcttgtcagccaagtttttaaccgttgctactccccctctgtgggctcagtgtgtggaccggaatacgtcgtacataggccgtagcctaagcccaatatgccgtttttcaggttggcctgtgtgacgacaagcgggtctcaaaagcccatcacgcaactggcctgcaattattggaggagagcgcgtcgagttggttccagaggctgcgtggtggggccggactctgcgacgacctctcgttcgcgtccgatttggttgccgtgagccgtgacgtaacgcctccttccgttcctccctatataagttccacccccgggtccggtttccccaagccccagtgacccccgatcccgatcgcgaaatctccgcacccgccggcaagggaccgaagcaagcctctctcccgaccgtcgcatcaaggtacgcgtccgctcgatctgtcctcttccttctcgatttgacttgctgtggtgcccgatcacgggatcagaatcgcaccagtgtagatttcgcatgttctaagatgtgttagtttccaggctaatccagttctcttgacgcccgatccgatcgagctccgtgtttatttcagcctaatcgtagtattcccctaaaatttcctcattagggggttcgcaagattgttggtcgacaggttcacttatgctcgatcgcttacttttagtcgattcatgctgcgtactattgttgccccccgtggttttatcttttctcgtgtgaaatccagtagatatagtagatatcgtagcattaggttttaattcaatcgattgattattgtatcatcaaaattgagaagttcgaatcatgcctatcatgctgcctcaaccgaaatcctgtatattgaagtttcaattcaattgattgatcattcattagattcaaccaaaatctagaaggttagatgacgcatgtcatgctgcctgcgtagtttacctttgatctgtttatgattaccttatcagtaggatatttgtgattttgggaagtagcactaactgattcatgctgacatgatgttccctttcagattatactgttgagtcctatctaattgatgctttgtatgctatatgaatacgtcatggtaaattagcagttaattagcatattagcaattgggcgtacctcatcaggattgctcttgtagatgtgtgtggtgatgtttcttgttcaattcatgttctgctttaaaagtatgtgttctctgtttgttaattaagattcatggttataatgatttggacctaattaatcagggttgcccttttagatgcgtggttacttgttgagttcatttttttcctgctatagttgtatgcgtttgttcattcatggttagatttgatttgtttcttctctattccatgccttccatatacttcaattgtagcttaacatgagatttctgtatatgcaggtcgaccgccggggatccacacgacaccatggcccagtccaagcacggcctgaccaaggagatgaccatgaagtaccgcatggagggctgcgtggacggccacaagttcgtgatcaccggcgagggcatcggctaccccttcaagggcaagcaggccatcaacctgtgcgtggtggagggcggccccttgcccttcgccgaggacatcttgtccgccgccttcatgtacggcaaccgcgtgttcaccgagtacccccaggacatcgtcgactacttcaagaactcctgccccgccggctacacctgggaccgctccttcctgttcgaggacggcgccgtgtgcatctgcaacgccgacatcaccgtgagcgtggaggagaactgcatgtaccacgagtccaagttctacggcgtgaacttccccgccgacggccccgtgatgaagaagatgaccgacaactgggagccctcctgcgagaagatcatccccgtgcccaagcagggcatcttgaagggcgacgtgagcatgtacctgctgctgaaggacggtggccgcttgcgctgccagttcgacaccgtgtacaaggccaagtccgtgccccgcaagatgcccgactggcacttcatccagcacaagctgacccgcgaggaccgcagcgacgccaagaaccagaagtggcacctgaccgagcacgccatcgcctccggctccgccttgccctccggactcagatctcgatagagtcaacctagacttgtccatcttctggattggccaacttaattaatgtatgaaataaaaggatgcacacatagtgacatgctaatcactataatgtgggcatcaaagttgtgtgttatgtgtaattactagttatctgaataaaagagaaagagatcatccatatttcttatcctaaatgaatgtcacgtgtctttataattctttgatgaaccagatgcatttcattaaccaaatccatatacatataaatattaatcatatataattaatatcaattgggttagcaaaacaaatctagtctaggtgtgttttgcgaattgcggcgcccttactttaacgcctctaaccaacacccctttatctttataaggaacaataaacagaatttgccccactgttctaaatcacctaataatatccccagctaaaaacaataaaggtttcctagaattaagacaagcatgactgttcctccaggagggtttggaacattgttgcagtcttgcagatacgggcgaagggtgagaaacagagcggagggctggaggtgacctcggtagtcgacgccggagttgagcttgacaacgacggggcggcccctgatggacttgaggaagtccgatggcgtcttcaccgtcccgccggcgcccgaggcgggcctgtcgctgccgccgccgccgctgctcatcttgcgcgctgtgcccccggcggtgtccctgtgttgcggatcgcgggtgggccaggtggatgcgagggcgacccgtttggactccggccggagccgccggatccctggtcggtgtcagtgccgtttactctgggccccacgtgtcagtaccgtctgtagatgacaacaacccgtcgtccacagtcatgtccaaaatatcctttcttcttttttttcgattcggatatctatcttccttttttttttccaaaaatcttcttgacgcaccagcgcgcacgtttgtggtaaacgccgacacgtcggtcccacgtcgatagaccccacccaccagtgagtagcgtgtacgtattcgggggtgacggacgtgtcgccgtcgtcttgctagtcccattcccatctgagccacacatctctgaacaaaaaaaaggagggaggcctccacgcacatccccctccgtgccacccgccccaaaccctcgcgccgcctccgagacagccgccgcaaccatggccaccgccgccgccgcgtctaccgcgctcactggcgccactaccgctgcgcccaaggcgaggcgccgggcgcacctcctggccacccgccgcgccctcgccgcgcccatcaggtgctcagcggcgtcacccgccatgccgatggctcccccggccaccccgctccggccgtggggccccaccgagccccgcaagggtgctgacatcctcgtcgagtccctcgagcgctgcggcgtccgcgacgtcttcgcctaccccggcggcgcgtccatggagatccaccaggcactcacccgctcccccgtcatcgccaaccacctcttccgccacgagcaaggggaggcctttgccgcctccggctacgcgcgctcctcgggccgcgtcggcgtctgcatcgccacctccggccccggcgccaccaacctagtctccgcgctcgccgacgcgctgctcgattccgtccccatggtcgccatcacgggacaggtggcgcgacgcatgattggcaccgacgccttccaggagacgcccatcgtcgaggtcacccgctccatcaccaagcacaactacctggtcctcgacgtcgacgacatcccccgcgtcgtgcaggaggctttcttcctcgcctcctctggtcgaccagggccggtgcttgtcgacatccccaaggacatccagcagcagatggcggtgcctgtctgggacaagcccatgagtctgcctgggtacattgcgcgccttcccaagccccctgcgactgagttgcttgagcaggtgctgcgtcttgttggtgaatcgcggcgccctgttctttatgtgggcggtggctgcgcagcatctggtgaggagttgcgacgctttgtggagctgactggaatcccggtcacaactactcttatgggcctcggcaacttccccagcgacgacccactgtctctgcgcatgctaggtatgcatgggacggtgtatgcaaattatgcagtggataaggccgatctgttgcttgcacttggtgtgcggtttgatgatcgcgtgacagggaagattgaggcttttgcaagcagggctaagattgtgcacgttgatattgatccggctgagattggcaagaacaagcagccacatgtgtccatctgtgcagatgttaagcttgctttgcagggcatgaatgctcttcttgaaggaagcacatcaaagaagagctttgactttggctcatggaacgatgagttggatcagcagaagagggaattcccccttgggtataaaacatctaatgaggagatccagccacaatatgctattcaggttcttgatgagctgacgaaaggcgaggccatcatcggcacaggtgttgggcagcaccagatgtgggcggcacagtactacacttacaagcggccaaggcagtggttgtcttcagctggtcttggggctatgggatttggtttgccggctgctgctggtgcttctgtggcaaacccaggtgtcactgttgttgacatcgatggagatggtagctttctcatgaacgttcaggagctagctatgatccgaattgagaacctcccagtgaaggtctttgtgctaaacaaccagcacctggggatggtggtgcagttggaggacaggttctataaggccaacagagcgcacacatacttgggaaacccagagaatgaaagtgagatatatccagatttcgtgacgatcgccaaagggttcaacattccagcggtccgtgtgacaaagaagaacgaagtccgcgcagcgataaagaagatgctcgagactccagggccgtacctcttggatataatcgtcccacaccaggagcatgtgttgcctatgatccctagtggtggggctttcaaggatatgatcctggatggtgatggcaggactgtgtactgactagctagtcagttaacagatctgccagatcctcggtgtacaaataacccgtcttatcctatgagacgggccggcgtcagtgtgttctggaggaatttttatgtcagagcctttttctttgtgtgcttgatgtagatgccaagggaagcttattggctgttgaagcttgatgcaaaataaattatggaactctgttttttgtttatctaataataactagcaaatatgcttccattgcattgaaactaacagccttttgtgtttccaagttttattttgtgacaatgtcatctatttcaattagttgtggaatcggaaacttgcaggactaacttggaaactccaatccctcagcatcctggactttttcctggtgtaatccatgtagatattattttaatcatcattttagttctggaggtttttccatctccggttttgctcccctttcttcaaaaaaaaaaaaaaaatgccgtaggcgccgcaacgcccacctgttgttcaaactcatgggcacgagtggctcgaagattttatacaacaattgctgtagtttcaccgttgctggtgaagaagcatttttttaaaaaaatatagtggtattcattttaattagtttagttgtgcagcgagcaaaatttggacatgctctgctcggaatctgatcgacctagacacagattagcagcagtagctttgtcatctgttccaagagttgcgatctgatagaagaaaaaaaaaccttcccttcaatgtaaaaccgaaactaacaagaaagaagcacagtgccgtttaggcaagtatggagtacgtattaagcatgtagaaggccatgcatgaaccactaacaagaaagaagcgcagtgccattcaggcaagcataagcatgtagattggcatgcatgaacaactaacagtagatcgtctctggtctgattagaagttttttgggaagccaagaaatcatgtacaactggttccatctcaaattccgtggcaaaaagaggcctaagcaacatacctcgagtagatcacattcaagcttggtcacccggtccgtcaatattctgattccgatgacttcgtaggttcctagctcaagccgctcgtgtccaagcgtcacttacgattagctaatgattacggcatctaggaccgactagtggcgcgccgactagctagctaaggtaccgagctcgaattcattccgattaatcgtggcctcttgctcttcaggatgaagagctatgtttaaacgtgcaagcgctactagacaattcagtacattaaaaacgtccgcaatgtgttattaagttgtctaagcgtcaatttgtttacaccacaatatatcctgcca

SEQ ID NO: 279 - DNA, 25839 bp, synthetic construct
  misc_feature 1..25839: note = PHP99971
  source 1..25839: mol_type = other DNA
gtttacccgccaatatatcctgtcaaacactgatagtttaaactgaaggcgggaaacgacaatctgatcatgagcggagaattaagggagtcacgttatgacccccgccgatgacgcgggacaagccgttttacgtttggaactgacagaaccgcaacgttgaaggagccactcagcaagctggtacgattgtaatacgactcactatagggcgaattgagcgctgtttaaacgctcttcaactggaagagcggttacgctgtttaaacgctcttcaactggaagagcggttactaccggttcactagctagctgctaatcgagctagttaccctatgaggtgacatgaagcgctcacggttactatgacggttagcttcacgactgttggtggcagtagcgtacgacttagctatagttccggacttacccttaagcgatttaaatctgcggttaccgaattcgagctcggtacctagtacccttgtacttttggtttcacctgcatagagaaaacccacaagaatatgacagtctgatttgtcagtctcattctcaagcaacatttctctatccgttactttcatggtgaataacacaatccatcatcaatactttgtgttactcagaaactgaaagttattccgagtcttgcatatctttggacctactcgtttttctaccattattgctgattgttaagctctcgctacttgaatcggcattgttggagtgggaaggttcaaaaaattggagttatgactagttgtctctttctatgtacgatggagaaaatgaataaacaactgagaaaatggctcttgtttagttgatgatgctcttaagctttccactggttgccatatatgatttgggcatttcactttgatcttaatgggccttgtaaagcccaagactcatgattatctttagttgatgctcttaattaggtgtgggcaaataattcaaactgtatgtacccgaccaaaaccaaagcaaaaataatcgaaccaaaccgaaaatttaaaaataaccgaatgaaaactaaatcctataactgaaagaactgaaaccgaatcaaaatatttaatgtaaccaaaaatatccgaaatataattatattgtcaaaaatattaataatttctagattaaataattaaaaatacttaaaaatttatataaaatagtaaaaatactcgaaaataaccacaaatattcaaaaacaaccgaaatatcccaaaatattcaaagcaaaataaccgaatggataccaaattttaaaaccgaaaaaactggaacaaaaccaaaatcgaaccaaaatttcaaaaatcgaataaatactaaactttagaacaaaaaaaaacgataaccgaatgtatacgaaccaaagccgaattagataaccgaacgtccaggactactcttaatctttccgccacttatgatttgggctattactttgtttataatgagccttttcaagctcaagttcatgattgtccgtgagatgagaaactgacttgttggattcgaaaccctagctagtattggttaatacttaatacataaatgacctgcattgacatcatcatccaagaaaataaaaattgtatgcttgagatatttagttttcctagctaggttttctttattttagtaccgaatctttaggtgtgccacgttaatttagacccattttttcatacttaccaactgagtctagtttaatcatgactataatcgtataaaatgattcagtcgacgtcattgcgaacgtatataaaatcatccaaattgacgtcattccaaagaggtaagcatgcttatctaagagtccgagcatactaaacaagacgacattttatttgcactccaaatcaaattttgtattgcctaaagaaaaacaatcaaactcaagtttcttaaaattaatttcattcaaactaatcactttcaatatctcacatattattcatgccatttctatttgtctaaacatgatttaaaaaaaaaagtaaaatacaaagattactatgcaaaaactctataaaaaaaaattcaaatttcttatttatttgtgacatcaaattttcaaaataatttttttaattatcggttgatccggtcagtcgataaaaacataaactttcagcgaccgttaaaactttcctactaccgatttagagaaaatcttagcttgaaacgtaattgtaacctgccttcatgcaagtcgcaagatatgtcatcctaagttgtatatgttttctcaaaagatgtatttacttgagaaaatacgtttcaacgttgatggacaaccaattaagaatcaagcacctttcgtaatcaatttaggcttatcgtctaaggtatactgatttacgacagttgactagacttataaggaacaaaataatagaatagtttctaaacacttcacctaatcatagagactaagatggtaattcgtaaacgacaaagcctagtgacactgtccattgtaaaattccacatcatattagtattaaacatatacatgtagtttcctgaacacatgtagtatcaaacacacttcgtggcttcttcctcgaaacctgcggccgcgctatagttccggacttacccttaagataacttcgtatagcatacattatacgaagttatgggcccacgcgtgaagagcggttaccagagctggtcacctttgtccaccaagatggaactgtcttcggccagaatggccatctggattcagcaggcctagaaggccatttatcgctatcaactttgtatagaaaagttgggccgaattcgagctcggtacggccagaatggcccggaccgaagcttgcggccgcacactgatagtttaaacgaatgtttatttgtattaacattgattagctggaatagtttttgttctcaatccgatataaacgaatgggacctcaattctctctgattcctttattaccaaaccagccattagtgcctgtgtcttttaaaaagaacacctttgcaacttgggcaatggctgtggaaaggaattgtggtgactggtgatgatgagtaagcgctgacgcgataacgagatgccgtgacggataggcattatctccatataagggctagtttggcatccccatttttccatgagatttccaattttctaaaggaaaatgaactaattttccttgggaaaatgaggttttcaaactagccctaaaaagatcgggcaaagtttttttttccctgctcgatttggaacctgcatcgaaagtcttccagaatgaattaaagcctcgtgtttgacgctttttttaataactataggatgttcggcgtctctttatcggatgatgtagctagggttgttaataagatctagattttaggctataaaatgtaggatcgaatcggattagcgtcaaactatattcatatccattttgaactaaaatgaattaagagccctgtcctaatttattgtgaagaaacacctagatcgttattcattgccatccctagatggagctactgtttcttagatccaaaatgtacatccatggtgatatagctagtgtttctcagatccaaaatgtccaactttacaaaaaaaagtcttcatgaaaataaggccccgtttggtttcagggactaaagattagtccatccattttagtttcatttagtccctaaattaccaaacggtgaaactaaaacaaagactaaaatatttgtctctatcctccaatgtatgactaaaaataattaaaccatataaattctaccttttgtccctcctttgttttagttacactaacggcggaaaaatgataagagacattttagttcttttatgatttatttaatgtattttaaatacttttagtcggatagagactaattaaattttagtcctgactaaagcaaaccaaacgggccctgactcatgcacacggtttcctctttatccaagcttccaaaaaatacccacttccactttagattctccgagtcacagatccaacaatattgctccaaaaagaagtactcctaaatccttccagaaaaggtgagagtacatattaaacccgataataggccaataaccactgttatatctatagcctattcctgaacatcagaattagtgttataaacatgaaatgtgaaggagttattacagtgagagctaccgtcagtggtgtggtcgggtttgctagtgtatgaaaacagattagatgtgttaaaataaagtagagtgaaaattaatttaaatacaattctagttgattaagaacatctccaaacgaacgactagtaacagatttggtttatcattacatgtataattgcgtgcggattttagcacacatggaatgagaggcaaacacgggcccaggaacggcccacgggagagagaaaccctacccttcccttcgcggtggtggcatccgagacccgtccacaaccaccacagacacggtgcaacccccccccccccccccccccccccccctcttaaaagccgcctctcgccgccgcccgcaaaccctcatttttctctctcctgcgccgcgacgtccctcgccttcgccgccgaatccgagactccgatctcgggttcaccgcagcgcacagagcagccccgactcccggcccgatccgcgctctcctctccgtcgcttcaggtgttcgcctcctccagatctcttgctgtctcgcttgttacttttttgtttgcttttcggcgtccgatctggtgcgacggcgggtctgggtccatctggcggtgctacccgtgcggatctgcgccgattcggtgggaatattagtgattttgacggttctggattgacgcacgggtttgcgcacggaaatactacctttcccccctttctctgacatgcggctttcagctcaatacatgatttttcttacgtaggatttgattgattttgtatgtagatataagcgttttccggtgctaatatgcaaaattgctagttttggtcatataaaactgtcctgggaagctccgtagcttgtgtaccgtgcttgagtattggattcaagctgtttgagctgtgggatgctgcatgcttgatggtaatgaattattctattgtggtaagtcaatttttttgtgaaagtgactatgagatggtcgcaagggtttgctacaggataaggttaaaagactgccctgccctatgtactagacgagccattcataccgtgcgaactgctaaaagctgttgctcgatttatcgagtacttgcaattatatcagcctgctgttaagaaagtgtaaagcatcaattgtcttggtatggttctgtttagattctttataaactgaagattgagttgagcatgcattttgtataaattgtagagcttgaataatcattttaagagtacaactgattccctattgattctgttgtgaattacttgtcttctagcatggtgtttgtcttaaacatttctttgctacacacttttctcgttgtaatctgtaggacagtttgttctaagcttaaactgtgccattgctcattatattgtatacatccttttgatctaggttcatgattaaacctttctttgtatttgtttgtcatattgtcaacatgtgctgtaacttctgtgtattaacatgtttcttttgctgcagtccccgggggatctcgactctagaggatcgctcaggaaggccgctgagatagaggcatggcggccaatgcgggcggcggtggagcgggaggaggcagcggcagcggcagcgtggctgcgccggcggtgtgccgccccagcggctcgcggtggacgccgacgccggagcagatcaggatgctgaaggagctctactacggctgcggcatccggtcgcccagctcggagcagatccagcgcatcaccgccatgctgcggcagcacggcaagatcgagggcaagaacgtcttctactggttccagaaccacaaggcccgcgagcgccagaagcgccgcctcaccagcctcgacgtcaacgtgcccgccgccggcgcggccgacgccaccaccagccaactcggcgtcctctcgctgtcgtcgccgccgccttcaggcgcggcgcctccctcgcccaccctcggcttctacgccgccggcaatggcggcggatcggctgtgctgctggacacgagttccgactggggcagcagcggcgctgccatggccaccgagacatgcttcctgcaggactacatgggcgtgacggacacgggcagctcgtcgcagtggccacgcttctcgtcgtcggacacgataatggcggcggccgcggcgcgggcggcgacgacgcgggcgcccgagacgctccctctcttcccgacctgcggcgacgacggcggcagcggtagcagcagctacttgccgttctggggtgccgcgtccacaactgccggcgccacttcttccgttgcgatccagcagcaacaccagctgcaggagcagtacagcttttacagcaacagcaacagcacccagctggccggcaccggcaaccaagacgtatcggcaacagcagcagcagccgccgccctggagctgagcctcagctcatggtgctccccttaccctgctgcagggagtatgtgagagcaacgcgagctgccactgctcttcactgatgtctctggaatggaaggaggaggaagtgagcatagcgttggtgcgttgctgtcaagggcgaattcacatggttaacctagacttgtccatcttctggattggccaacttaattaatgtatgaaataaaaggatgcacacatagtgacatgctaatcactataatgtgggcatcaaagttgtgtgttatgtgtaattactagttatctgaataaaagagaaagagatcatccatatttcttatcctaaatgaatgtcacgtgtctttataattctttgatgaaccagatgcatttcattaaccaaatccatatacatataaatattaatcatatataattaatatcaattgggttagcaaaacaaatctagtctaggtgtgttttgcgaatgcggccgccaccgcggtggagctcgaattccggtccgggcctagaaggccagcttcaagtttgtacaaaaaagcaggctccggccagaatctcactgactagctaaacagcggccgcatcgagcagctggcttgtggggaccagacaaaaaaggaatggtgcagaattgttaggcgcacctaccaaaagcatctttgcctttattgcaaagataaagcagattcctctagtacaagtggggaacaaaataacgtggaaaagagctgtcctgacagcccactcactaatgcgtatgacgaacgcagtgacgaccacaaaactcgagcaacgagatcatgagccaatcaaagaggagtgatgtagacctaaagcaataatggagccatgacgtaagggcttacgcccatacgaaataattaaaggctgatgtgacctgtcggtctctcagaacctttactttttatgtttggcgtgtatttttaaatttccacggcaatgacgatgtgaccgtcgacccactaaaacattgctttgtcaaaagctaaaaaagatgatgcccgacagccacttgtgtgaagcatgagaagccggtccctccactaagaaaattagtgaagcatcttccagtggtccctccactcacagctcaatcagtgagcaacaggacgaaggaaatgacgtaagccatgacgtctaatcccagggcccggtgaccaatcgaattagcttggcgcgtggaccgaagcttgcatgcctgcagtgcagcgtgacccggtcgtgcccctctctagagataatgagcattgcatgtctaagttataaaaaattaccacatattttttttgtcacacttgtttgaagtgcagtttatctatctttatacatatatttaaactttactctacgaataatataatctatagtactacaataatatcagtgttttagagaatcatataaatgaacagttagacatggtctaaaggacaattgagtattttgacaacaggactctacagttttatctttttagtgtgcatgtgttctcctttttttttgcaaatagcttcacctatataatacttcatccattttattagtacatccatttagggtttagggttaatggtttttatagactaatttttttagtacatctattttattctattttagcctctaaattaagaaaactaaaactctattttagtttttttatttaataatttagatataaaatagaataaaataaagtgactaaaaattaaacaaataccctttaagaaattaaaaaaactaaggaaacatttttcttgtttcgagtagataatgccagcctgttaaacgccgtcgacgagtctaacggacaccaaccagcgaaccagcagcgtcgcgtcgggccaagcgaagcagacggcacggcatctctgtcgctgcctctggacccctctcgagagttccgctccaccgttggacttgctccgctgtcggcatccagaaattgcgtggcggagcggcagacgtgagccggcacggcaggcggcctcctcctcctctcacggcaccggcagctacgggggattcctttcccaccgctccttcgctttcccttcctcgcccgccgtaataaatagacaccccctccacaccctctttccccaacctcgtgttgttcggagcgcacacacacacaaccagatctcccccaaatccacccgtcggcacctccgcttcaaggtacgccgctcgtcctcccccccccccctctctaccttctctagatcggcgttccggtccatgcatggttagggcccggtagttctacttctgttcatgtttgtgttagatccgtgtttgtgttagatccgtgctgctagcgttcgtacacggatgcgacctgtacgtcagacacgttctgattgctaacttgccagtgtttctctttggggaatcctgggatggctctagccgttccgcagacgggatcgatttcatgattttttttgtttcgttgcatagggtttggtttgcccttttcctttatttcaatatatgccgtgcacttgtttgtcgggtcatcttttcatgcttttttttgtcttggttgtgatgatgtggtctggttgggcggtcgttctagatcggagtagaattctgtttcaaactacctggtggatttattaattttggatctgtatgtgtgtgccatacatattcatagttacgaattgaagatgatggatggaaatatcgatctaggataggtatacatgttgatgcgggttttactgatgcatatacagagatgctttttgttcgcttggttgtgatgatgtggtgtggttgggcggtcgttcattcgttctagatcggagtagaatactgtttcaaactacctggtgtatttattaattttggaactgtatgtgtgtgtcatacatcttcatagttacgagtttaagatggatggaaatatcgatctaggataggtatacatgttgatgtgggttttactgatgcatatacatgatggcatatgcagcatctattcatatgctctaaccttgagtacctatctattataataaacaagtatgttttataattattttgatcttgatatacttggatgatggcatatgcagcagctatatgtggatttttttagcactgccttcatacgctatttatttgcttggtactgtttcttttgtcgatgctcaccctgttgtttggtgttacttctgcaggtcgactttaacttagcctaggatccatggccactgtgaacaactggctcgctttctccctctccccgcaggagctgccgccctcccagacgacggactccacactcatctcggccgccaccgccgaccatgtctccggcgatgtctgcttcaacatcccccaagattggagcatgaggggatcagagctttcggcgctcgtcgcggagccgaagctggaggacttcctcggcggcatctccttctccgagcagcatcacaaggccaactgcaacatgatacccagcactagcagcacagtttgctacgcgagctcaggtgctagcaccggctaccatcaccagctgtaccaccagcccaccagctcagcgctccacttcgcggactccgtaatggtggcttcctcggccggtgtccacgacggcggtgccatgctcagcgcggccgccgctaacggtgtcgctggcgctgccagtgccaacggcggcggcatcgggctgtccatgattaagaactggctgcggagccaaccggcgcccatgcagccgagggtggcggcggctgagggcgcgcaggggctctctttgtccatgaacatggcggggacgacccaaggcgctgctggcatgccacttctcgctggagagcgcgcacgggcgcccgagagtgtatcgacgtcagcacagggtggagccgtcgtcgtcacggcgccgaaggaggatagcggtggcagcggtgttgccggcgctctagtagccgtgagcacggacacgggtggcagcggcggcgcgtcggctgacaacacggcaaggaagacggtggacacgttcgggcagcgcacgtcgatttaccgtggcgtgacaaggcatagatggactgggagatatgaggcacatctttgggataacagttgcagaagggaagggcaaactcgtaagggtcgtcaagtctatttaggtggctatgataaagaggagaaagctgctagggcttatgatcttgctgctctgaagtactggggtgccacaacaacaacaaattttccagtgagtaactacgaaaaggagctcgaggacatgaagcacatgacaaggcaggagtttgtagcgtctctgagaaggaagagcagtggtttctccagaggtgcatccatttacaggggagtgactaggcatcaccaacatggaagatggcaagcacggattggacgagttgcagggaacaaggatctttacttgggcaccttcagcacccaggaggaggcagcggaggcgtacgacatcgcggcgatcaagttccgcggcctcaacgccgtcaccaacttcgacatgagccgctacgacgtgaagagcatcctggacagcagcgccctccccatcggcagcgccgccaagcgcctcaaggaggccgaggccgcagcgtccgcgcagcaccaccacgccggcgtggtgagctacgacgtcggccgcatcgcctcgcagctcggcgacggcggagccctggcggcggcgtacggcgcgcactaccacggcgccgcctggccgaccatcgcgttccagccgggcgccgccagcacaggcctgtaccacccgtacgcgcagcagccaatgcgcggcggcgggtggtgcaagcaggagcaggaccacgcggtgatcgcggccgcgcacagcctgcaggacctccaccacctgaacctgggcgcggccggcgcgcacgactttttctcggcagggcagcaggccgccgccgctgcgatgcacggcctgggtagcatcgacagtgcgtcgctcgagcacagcaccggctccaactccgtcgtctacaacggcggggtcggcgacagcaacggcgccagcgccgtcggcggcagtggcggtggctacatgatgccgatgagcgctgccggagcaaccactacatcggcaatggtgagccacgagcaggtgcatgcacgggcctacgacgaagccaagcaggctgctcagatggggtacgagagctacctggtgaacgcggagaacaatggtggcggaaggatgtctgcatgggggactgtcgtgtctgcagccgcggcggcagcagcaagcagcaacgacaacatggccgccgacgtcgggcatggcggcgcgcagctcttcagtgtctggaacgacacttaagcgtacctagtggtacctgacatcttatagtctgcaacctctcgtgtctgaattcctatctttatcaagtgttattgcttccacgactataggacagctttcgtcgaaagcttttgctcatgtgatctcgaaggattcatctagtctgatttttcgtgacttgtatcggttttattggattcatccaacatatatcaataaaaaatgagttgtgtttcctttcttcctagttcagttaaaattatttccctcctgcgcttgtgctgtaattgtctgtgtacctgttgtttgtgactgtgttagttcccttggatatgatttcgtatttgatatgtacatggagatagcttagcttcattattggagtatgaagttagtatgacatagtcactctcctggaaaattgacactgcaaaccatatttttattctgaaccacaaatcctagtcagtccgctggcatatgccgtccgtttgctgaatccagaacgtgggtttggagatgtacggctgagatgcctctatgcgaaggggatttcgtggtgaaacgagatgggagtagagcaacgcccgtggaagatgcttcaaacttccacacttttgagcaacgatcggcagtagtaaggtagacgatttcaagatcaaagcatatgaagataaacaacatcaacaacaaaatttgttggggttctatagagagaaacagagctacatacatacactgttttgtatctaccatctgagatgatgaaaagatgaaaaactaaagaatgccccggcgccaacgccaggacacgccgcgcgcgcgtcacccgagccatctcttgacccagccggcgctgtatatttacacacgttgcagcatcgatcaccacctgttcgatcgcgtcgccgtcaccggcgcgccgcgacttattgaactagtctagggcgcggctaacaacctagcttagattgccttgtctaaacccttaggctaacgcgccactctagaaggccgatctcccccgaacgcgccagatccgatatcgatgggccctggccgaagcttggtcacccggtccgggcctagaaggccgatctcccgggcacccagctttcttgtacaaagtggccgttaacggatcggccagaatggcccggaccgggttaccccgcggttcaaagccaatgactgttgttaggtccagtttctaaggacgaatcatccaatcactggttctttctgaacaaaacaaagagctatagagttacgttactgtagccgagacagagcctgcaatctggttatgccacatactaggttctttcttaaagttgactcactctatcctaagttctacttacaaggagctacaacaaattggtcataaccggagagcgttcaaggaggtaatatcccatcttactctgtagcaaggctacaaaaggagagctaaagaactaggctacaaaaagagagctaaagaactaactatctagcaagactacagagctatagtgtagagatttcataaccggtgagcgttcaaggatactttgaagagaagaggtaatatctcaactagcaagactacaaaaaaatggagatataaaactaactgtctaacaagactacagagctatagtagagatagatacgttcgacacttaagcatgagaattcgagctcggtaccctggttcacaaactcaatacaacacacagtggagtagggtattacgctccggcggcccgaaccactctaaatccttgtgtcctcgtgtgctcttccaccattaatgactgtaattgcagggacacgaagagttgtagcgcttttgccaacaagatccgctatatgctagtagagtggaacctgcacagcaacaagcatccaataatctgagaataagaattatgtgtggtgatggttctcatctctgcaactcgccattttcgcgagagaaccaaatccaagttggtgaagatcatgatttgggctcatgggctggcatagtagctattacctttgcaattgtggttcgaatctatccgatattctccttttcagggagagctaatgcttatgcttattgggtattttggtttgacactgcttcacgcccaaaaaaaggcaactatgtctgagttggatatggcccaaaaaaaggcagctatgtctgagttggatatggaagtcttctttcgtttagggtgaagtaagaccaagctcatgagcttattatcttaggtcggaacaaattagttgataggcatggcacatttatcaaattataatgattttaacagaaaagcaacacctctttttcagcagcaccagctttgcaagctgcaattgacactccaagcatagtatttgctccaaactcagcctgcatttcgcacaatatcatatctatttccatttggataaaatatattttccagaaatatgggaacagaatcaagatacagaaaaaagttgtggtagtagtggtaagtggaaacacaagtacagtgaaaagatagcattatttctgaacagtcaaattaaccgaaataagtagtatcacatactgcccctaaattgactacacccaatgtaaagaattgcttgagcatattgagccatcagttgtttgtttgtgtaacggatttgacaatgcagagttcaggagcaaaaaaccgcaaaggagagaaagagggaaaggatctcctagtatcccaccttgtggcgcgccctgtcaagtgcatgatggcctggtcgatctgcgtctgctgctgcggttccatcccaacgagtgcctccgacaccttgtcgttgatcacccgcaccgcgtaggcgacccccctggcgaggaacttccgcctctcggaggccccggccgcgtcggcggcggcgccctcgagcgcgcccacgctagccgtagatgctcggtgcacggccttgttggtgtgcaactcgacctcaacggccggtgcgctacgcccgtcaaggatctggcgcgcccgcaccctcgtgatcacggtgggcgcctcccgcctcatgtggccgacgatgaaaagcgccgggttaggggccttggcgcgcaccgccgtattcagggcctcctcgctcttgcgcgagagcaggtgcttccccaggtactcctgcactgacaaggctgccacagcggtggaatttgtcctcacgacttcgccacgtcgtcctcacctccctggcttcccacgactccgccgtatcgaggtgctcggtgggtcgtcttaatccgaagtccgaactaggaagacgagacagagaggtctgaggaatgggcctcgtttgatgttgagctgaattatttttccagcataagcccaggtcttggtccatgaacaaaattactagaaacccagcccagtactacgatctaaaagagggactgccactggatagctctctctagcattctccacgctccaatacagcggcgtcgtgtctatccgggtctatccgcgaacacgtgagaactctccagaaactgctttctcctccacttcatctctctcgctttccctctataaaaagaccccttctaggaattgagggagacagcaagcaccaagcagcgatccgaagctcaatcaattcactcaaacctcttccccaaatcttcgattagatcttcgttgacaagaagactagaaccgaacctgacatgtccaacctgctcacggttcaccagaaccttccggctcttccagtggacgcgacgtccgatgaagtcaggaagaacctcatggacatgttccgcgacaggcaagcgttcagcgagcacacctggaagatgctgctctccgtctgccgctcctgggctgcatggtgcaagctgaacaacaggaagtggttccccgctgagcccgaggacgtgagggattaccttctgtacctgcaagcgcgaggtttgtttctgcttctacctttgatatatatataataattatcattaattagtagtaatataatatttcaaatatttttttcaaaataaaagaatgtagtatatagcaattgcttttctgtagtttataagtgtgtatattttaatttataacttttctaatatatgaccaaaacatggtgatgcctaggtctggcagtgaagaccatccagcaacaccttggacaactgaacatgcttcacaggcgctccggcctcccgcgccccagcgactcgaacgccgtgagcctcgtcatgcgccgcatcaggaaggaaaacgtcgatgccggcgaaagggcaaagcaggccctcgcgttcgagaggaccgatttcgaccaggtccgcagcctgatggagaacagcgacaggtgccaggacattaggaacctggcgttcctcggaattgcatacaacacgctcctcaggatcgcggaaattgcccgcattcgcgtgaaggacattagccgcaccgacggcggcaggatgcttatccacattggcaggaccaagacgctcgtttccaccgcaggcgtcgaaaaggccctcagcctcggagtgaccaagctcgtcgaacgctggatctccgtgtccggcgtcgcggacgacccaaacaactacctcttctgccgcgtccgcaagaacggggtggctgcccctagcgccaccagccaactcagcacgagggccttggaaggtattttcgaggccacccaccgcctgatctacggcgcgaaggatgacagcggtcaacgctacctcgcatggtccgggcactccgcccgcgttggagctgctagggacatggcccgcgccggtgtttccatccccgaaatcatgcaggcgggtggatggacgaacgtgaacattgtcatgaactacattcgcaaccttgacagcgagacgggcgcaatggttcgcctcctggaagatggtgactgaggtacccaacctagacttgtccatcttctggattggccaacttaattaatgtatgaaataaaaggatgcacacatagtgacatgctaatcactataatgtgggcatcaaagttgtgtgttatgtgtaattactagttatctgaataaaagagaaagagatcatccatatttcttatcctaaatgaatgtcacgtgtctttataattctttgatgaaccagatgcatttcattaaccaaatccatatacatataaatattaatcatatataattaatatcaattgggttagcaaaacaaatctagtctaggtgtgttttgcgatccgatatcgaattggccacggtaccagctgctgctgttctagggttcacaagtctgcctatttgtcttccccaatggagctatggttgtctggtctggtccttggtcgtgtcccgtttcattgtgtactatttacctgtaatgtgtatccttaagtctggtttgatggtgtctgaaacgttttgctgtggtagagcagcatggaagaactataatgaataagtgatccctaatcattgtgtccaaattttgcttctgctatacccttttgtgctgtttcttatgttttgcttaaaaatttgatctgacaaacaaatttgtctaaattatgctcttgttctgactgtgtactgtacacatttgtattgctaccggtttggcacatagttttctctttgattgcagatcaaacccttctgattgcagattgcttggctatggctgatgtgctcactgttcttctttagcttgtatattgctgatggtggcttggctacggctgaaaaagttgctgctgcgccgacttggcaactgttgctccagtaatgctttgtcctctcttcctagccgccgacttggcacttggcagctgttgctcctgtaatgcgttgttatctcttatctcttgagatgtactatgattttgaggctgtttgacttgtgccagattgccagtgctgatgctatattatctcaggtttttatgctagtatatgttttactgtgtgctgcctgtgtcgagttacgtaatctattgaaccgctatgcgtgttgatgccctgttgttgcttgccagattgatgcccctgttgcttgcagcttgcaagctgtagtgaaatcctaaaattccaaaccaaatctattctgaacttttgaagatctgtgatgtccggaagaaaagattcaaacagataaacgggactctccagaatctataaaataaatgatcgacaaacgctttgctttggtaggcttcaagcttggtcacccggtccgggcctagaaggccagcttcggccgccccgggcaactttattatacaaagttgatagataaatcagatatctggttcctaaggacccggcggaccgattaaactgattcggtccgacgcgttacctaataacttcgtatagcatacattatacgaagttattagctaactaactagtaagcttaagccatgggtcgacggatccgttaactagcgtggcatttggcaccgccgcacactatgcgagctaggagtgctagtttacagatgaaactatgaaaccaagaaaacacaattgtccgtagctagcgcgtggcgtcgtgtcaagcttcacacagtatcttcgttcttcactataaatcgcgcctgttgttcgtgagacccaccaccgtggataacagtcccctaataataagcgatcaacagcactgctgatggctgaacaccgaggcgccgccgcgcgtaaccatccgccggagcagcccgtcgtgccggcgaacgacgccttccccgaccgcgcccagcagctctgcctcgacgccgggcgcgcgctcgcgatgtgcggcgtgctcgtcgccgtccctcccgcattttacgcgtcgacgtcgcggacgacaccgcacttgccttcgtcggcttcgtcctctggatcatcggtgcgtggctgtgcctcctggcgctcacgcccttggctccacgggcggtgagggcgggcggggccgccgccagcaccttgctgatcaggtgcctgtccctttcatgaactactagcgcccgcgcccgcggccgccgggcacaagagaacacatcgatgttcgctgcgtacgtcagcaataaggcactctttgtcagtagtcgagtgcatatgttgggtgtttgccctgggagatttcaagtgttgtggccattatcccgcaggataaaaaatcggcggcttttggattgatacggaaaataacgatgtttcatgctcgtgttgtgtgtgtgacatcttgtcagccaagtttttaaccgttgctactccccctctgtgggctcagtgtgtggaccggaatacgtcgtacataggccgtagcctaagcccaatatgccgtttttcaggttggcctgtgtgacgacaagcgggtctcaaaagcccatcacgcaactggcctgcaattattggaggagagcgcgtcgagttggttccagaggctgcgtggtggggccggactctgcgacgacctctcgttcgcgtccgatttggttgccgtgagccgtgacgtaacgcctccttccgttcctccctatataagttccacccccgggtccggtttccccaagccccagtgacccccgatcccgatcgcgaaatctccgcacccgccggcaagggaccgaagcaagcctctctcccgaccgtcgcatcaaggtacgcgtccgctcgatctgtcctcttccttctcgatttgacttgctgtggtgcccgatcacgggatcagaatcgcaccagtgtagatttcgcatgttctaagatgtgttagtttccaggctaatccagttctcttgacgcccgatccgatcgagctccgtgtttatttcagcctaatcgtagtattcccctaaaatttcctcattagggggttcgcaagattgttggtcgacaggttcacttatgctcgatcgcttacttttagtcgattcatgctgcgtactattgttgccccccgtggttttatcttttctcgtgtgaaatccagtagatatagtagatatcgtagcattaggttttaattcaatcgattgattattgtatcatcaaaattgagaagttcgaatcatgcctatcatgctgcctcaaccgaaatcctgtatattgaagtttcaattcaattgattgatcattcattagattcaaccaaaatctagaaggttagatgacgcatgtcatgctgcctgcgtagtttacctttgatctgtttatgattaccttatcagtaggatatttgtgattttgggaagtagcactaactgattcatgctgacatgatgttccctttcagattatactgttgagtcctatctaattgatgctttgtatgctatatgaatacgtcatggtaaattagcagttaattagcatattagcaattgggcgtacctcatcaggattgctcttgtagatgtgtgtggtgatgtttcttgttcaattcatgttctgctttaaaagtatgtgttctctgtttgttaattaagattcatggttataatgatttggacctaattaatcagggttgcccttttagatgcgtggttacttgttgagttcatttttttcctgctatagttgtatgcgtttgttcattcatggttagatttgatttgtttcttctctattccatgccttccatatacttcaattgtagcttaacatgagatttctgtatatgcaggtcgaccgccggggatccacacgacaccatggcccagtccaagcacggcctgaccaaggagatgaccatgaagtaccgcatggagggctgcgtggacggccacaagttcgtgatcaccggcgagggcatcggctaccccttcaagggcaagcaggccatcaacctgtgcgtggtggagggcggccccttgcccttcgccgaggacatcttgtccgccgccttcatgtacggcaaccgcgtgttcaccgagtacccccaggacatcgtcgactacttcaagaactcctgccccgccggctacacctgggaccgctccttcctgttcgaggacggcgccgtgtgcatctgcaacgccgacatcaccgtgagcgtggaggagaactgcatgtaccacgagtccaagttctacggcgtgaacttccccgccgacggccccgtgatgaagaagatgaccgacaactgggagccctcctgcgagaagatcatccccgtgcccaagcagggcatcttgaagggcgacgtgagcatgtacctgctgctgaaggacggtggccgcttgcgctgccagttcgacaccgtgtacaaggccaagtccgtgccccgcaagatgcccgactggcacttcatccagcacaagctgacccgcgaggaccgcagcgacgccaagaaccagaagtggcacctgaccgagcacgccatcgcctccggctccgccttgccctccggactcagatctcgatagagtcaacctagacttgtccatcttctggattggccaacttaattaatgtatgaaataaaaggatgcacacatagtgacatgctaatcactataatgtgggcatcaaagttgtgtgttatgtgtaattactagttatctgaataaaagagaaagagatcatccatatttcttatcctaaatgaatgtcacgtgtctttataattctttgatgaaccagatgcatttcattaaccaaatccatatacatataaatattaatcatatataattaatatcaattgggttagcaaaacaaatctagtctaggtgtgttttgcgaattgcggcgcccttactttaacgcctctaaccaacacccctttatctttataaggaacaataaacagaatttgccccactgttctaaatcacctaataatatccccagctaaaaacaataaaggtttcctagaattaagacaagcatgactgttcctccaggagggtttggaacattgttgcagtcttgcagatacgggcgaagggtgagaaacagagcggagggctggaggtgacctcggtagtcgacgccggagttgagcttgacaacgacggggcggcccctgatggacttgaggaagtccgatggcgtcttcaccgtcccgccggcgcccgaggcgggcctgtcgctgccgccgccgccgctgctcatcttgcgcgctgtgcccccggcggtgtccctgtgttgcggatcgcgggtgggccaggtggatgcgagggcgacccgtttggactccggccggagccgccggatccctggtcggtgtcagtgccgtttactctgggccccacgtgtcagtaccgtctgtagatgacaacaacccgtcgtccacagtcatgtccaaaatatcctttcttcttttttttcgattcggatatctatcttccttttttttttccaaaaatcttcttgacgcaccagcgcgcacgtttgtggtaaacgccgacacgtcggtcccacgtcgatagaccccacccaccagtgagtagcgtgtacgtattcgggggtgacggacgtgtcgccgtcgtcttgctagtcccattcccatctgagccacacatctctgaacaaaaaaaaggagggaggcctccacgcacatccccctccgtgccacccgccccaaaccctcgcgccgcctccgagacagccgccgcaaccatggccaccgccgccgccgcgtctaccgcgctcactggcgccactaccgctgcgcccaaggcgaggcgccgggcgcacctcctggccacccgccgcgccctcgccgcgcccatcaggtgctcagcggcgtcacccgccatgccgatggctcccccggccaccccgctccggccgtggggccccaccgagccccgcaagggtgctgacatcctcgtcgagtccctcgagcgctgcggcgtccgcgacgtcttcgcctaccccggcggcgcgtccatggagatccaccaggcactcacccgctcccccgtcatcgccaaccacctcttccgccacgagcaaggggaggcctttgccgcctccggctacgcgcgctcctcgggccgcgtcggcgtctgcatcgccacctccggccccggcgccaccaacctagtctccgcgctcgccgacgcgctgctcgattccgtccccatggtcgccatcacgggacaggtggcgcgacgcatgattggcaccgacgccttccaggagacgcccatcgtcgaggtcacccgctccatcaccaagcacaactacctggtcctcgacgtcgacgacatcccccgcgtcgtgcaggaggctttcttcctcgcctcctctggtcgaccagggccggtgcttgtcgacatccccaaggacatccagcagcagatggcggtgcctgtctgggacaagcccatgagtctgcctgggtacattgcgcgccttcccaagccccctgcgactgagttgcttgagcaggtgctgcgtcttgttggtgaatcgcggcgccctgttctttatgtgggcggtggctgcgcagcatctggtgaggagttgcgacgctttgtggagctgactggaatcccggtcacaactactcttatgggcctcggcaacttccccagcgacgacccactgtctctgcgcatgctaggtatgcatgggacggtgtatgcaaattatgcagtggataaggccgatctgttgcttgcacttggtgtgcggtttgatgatcgcgtgacagggaagattgaggcttttgcaagcagggctaagattgtgcacgttgatattgatccggctgagattggcaagaacaagcagccacatgtgtccatctgtgcagatgttaagcttgctttgcagggcatgaatgctcttcttgaaggaagcacatcaaagaagagctttgactttggctcatggaacgatgagttggatcagcagaagagggaattcccccttgggtataaaacatctaatgaggagatccagccacaatatgctattcaggttcttgatgagctgacgaaaggcgaggccatcatcggcacaggtgttgggcagcaccagatgtgggcggcacagtactacacttacaagcggccaaggcagtggttgtcttcagctggtcttggggctatgggatttggtttgccggctgctgctggtgcttctgtggcaaacccaggtgtcactgttgttgacatcgatggagatggtagctttctcatgaacgttcaggagctagctatgatccgaattgagaacctcccagtgaaggtctttgtgctaaacaaccagcacctggggatggtggtgcagttggaggacaggttctataaggccaacagagcgcacacatacttgggaaacccagagaatgaaagtgagatatatccagatttcgtgacgatcgccaaagggttcaacattccagcggtccgtgtgacaaagaagaacgaagtccgcgcagcgataaagaagatgctcgagactccagggccgtacctcttggatataatcgtcccacaccaggagcatgtgttgcctatgatccctagtggtggggctttcaaggatatgatcctggatggtgatggcaggactgtgtactgactagctagtcagttaacagatctgccagatcctcggtgtacaaataacccgtcttatcctatgagacgggccggcgtcagtgtgttctggaggaatttttatgtcagagcctttttctttgtgtgcttgatgtagatgccaagggaagcttattggctgttgaagcttgatgcaaaataaattatggaactctgttttttgtttatctaataataactagcaaatatgcttccattgcattgaaactaacagccttttgtgtttccaagttttattttgtgacaatgtcatctatttcaattagttgtggaatcggaaacttgcaggactaacttggaaactccaatccctcagcatcctggactttttcctggtgtaatccatgtagatattattttaatcatcattttagttctggaggtttttccatctccggttttgctcccctttcttcaaaaaaaaaaaaaaaatgccgtaggcgccgcaacgcccacctgttgttcaaactcatgggcacgagtggctcgaagattttatacaacaattgctgtagtttcaccgttgctggtgaagaagcatttttttaaaaaaatatagtggtattcattttaattagtttagttgtgcagcgagcaaaatttggacatgctctgctcggaatctgatcgacctagacacagattagcagcagtagctttgtcatctgttccaagagttgcgatctgatagaagaaaaaaaaaccttcccttcaatgtaaaaccgaaactaacaagaaagaagcacagtgccgtttaggcaagtatggagtacgtattaagcatgtagaaggccatgcatgaaccactaacaagaaagaagcgcagtgccattcaggcaagcataagcatgtagattggcatgcatgaacaactaacagtagatcgtctctggtctgattagaagttttttgggaagccaagaaatcatgtacaactggttccatctcaaattccgtggcaaaaagaggcctaagcaacatacctcgagtagatcacattcaagcttggtcacccggtccgtcaatattctgattccgatgacttcgtaggttcctagctcaagccgctcgtgtccaagcgtcacttacgattagctaatgattacggcatctaggaccgactagtggcgcgccgactagctagctaaggtaccgagctcgaattcattccgattaatcgtggcctcttgctcttcaggatgaagagctatgtttaaacgtgcaagcgctactagacaattcagtacattaaaaacgtccgcaatgtgttattaagttgtctaagcgtcaatttgtttacaccacaatatatcctgcca

SEQ ID NO: 280 - DNA, 24653 bp, synthetic construct
  misc_feature 1..24653: note = PHP99809
  source 1..24653: mol_type = other DNA
gtttacccgccaatatatcctgtcaaacactgatagtttaaactgaaggcgggaaacgacaatctgatcatgagcggagaattaagggagtcacgttatgacccccgccgatgacgcgggacaagccgttttacgtttggaactgacagaaccgcaacgttgaaggagccactcagcaagctggtacgattgtaatacgactcactatagggcgaattgagcgctgtttaaacgctcttcaactggaagagcggttacgctgtttaaacgctcttcaactggaagagcggttactaccggttcactagctagctgctaatcgagctagttaccctatgaggtgacatgaagcgctcacggttactatgacggttagcttcacgactgttggtggcagtagcgtacgacttagctatagttccggacttacccttaagcgatttaaatctgcggttaccgaattcgagctcggtacctagtacccttgtacttttggtttcacctgcatagagaaaacccacaagaatatgacagtctgatttgtcagtctcattctcaagcaacatttctctatccgttactttcatggtgaataacacaatccatcatcaatactttgtgttactcagaaactgaaagttattccgagtcttgcatatctttggacctactcgtttttctaccattattgctgattgttaagctctcgctacttgaatcggcattgttggagtgggaaggttcaaaaaattggagttatgactagttgtctctttctatgtacgatggagaaaatgaataaacaactgagaaaatggctcttgtttagttgatgatgctcttaagctttccactggttgccatatatgatttgggcatttcactttgatcttaatgggccttgtaaagcccaagactcatgattatctttagttgatgctcttaattaggtgtgggcaaataattcaaactgtatgtacccgaccaaaaccaaagcaaaaataatcgaaccaaaccgaaaatttaaaaataaccgaatgaaaactaaatcctataactgaaagaactgaaaccgaatcaaaatatttaatgtaaccaaaaatatccgaaatataattatattgtcaaaaatattaataatttctagattaaataattaaaaatacttaaaaatttatataaaatagtaaaaatactcgaaaataaccacaaatattcaaaaacaaccgaaatatcccaaaatattcaaagcaaaataaccgaatggataccaaattttaaaaccgaaaaaactggaacaaaaccaaaatcgaaccaaaatttcaaaaatcgaataaatactaaactttagaacaaaaaaaaacgataaccgaatgtatacgaaccaaagccgaattagataaccgaacgtccaggactactcttaatctttccgccacttatgatttgggctattactttgtttataatgagccttttcaagctcaagttcatgattgtccgtgagatgagaaactgacttgttggattcgaaaccctagctagtattggttaatacttaatacataaatgacctgcattgacatcatcatccaagaaaataaaaattgtatgcttgagatatttagttttcctagctaggttttctttattttagtaccgaatctttaggtgtgccacgttaatttagacccattttttcatacttaccaactgagtctagtttaatcatgactataatcgtataaaatgattcagtcgacgtcattgcgaacgtatataaaatcatccaaattgacgtcattccaaagaggtaagcatgcttatctaagagtccgagcatactaaacaagacgacattttatttgcactccaaatcaaattttgtattgcctaaagaaaaacaatcaaactcaagtttcttaaaattaatttcattcaaactaatcactttcaatatctcacatattattcatgccatttctatttgtctaaacatgatttaaaaaaaaaagtaaaatacaaagattactatgcaaaaactctataaaaaaaaattcaaatttcttatttatttgtgacatcaaattttcaaaataatttttttaattatcggttgatccggtcagtcgataaaaacataaactttcagcgaccgttaaaactttcctactaccgatttagagaaaatcttagcttgaaacgtaattgtaacctgccttcatgcaagtcgcaagatatgtcatcctaagttgtatatgttttctcaaaagatgtatttacttgagaaaatacgtttcaacgttgatggacaaccaattaagaatcaagcacctttcgtaatcaatttaggcttatcgtctaaggtatactgatttacgacagttgactagacttataaggaacaaaataatagaatagtttctaaacacttcacctaatcatagagactaagatggtaattcgtaaacgacaaagcctagtgacactgtccattgtaaaattccacatcatattagtattaaacatatacatgtagtttcctgaacacatgtagtatcaaacacacttcgtggcttcttcctcgaaacctgcggccgcgctatagttccggacttacccttaagataacttcgtatagcatacattatacgaagttatgggcccacgcgtgaagagcggttaccagagctggtcacctttgtccaccaagatggaactgtcttcggccagaatggccatctggattcagcaggcctagaaggccatttatcgctatcaactttgtatagaaaagttgggccgaattcgagctcggtacggccagaatggcccggaccgaagcttgtgtctcaggtgtcagccaccacgactagtcaccccagtcccttggtcaagtcccaacgctcattcttcgtcgcacctggtccatcggcacaaacccgcatgaccttcacctttgtcgccgaccaccgtccctgtgctccgcacctacacaccataagccgacagacatggttgtacaacacatagctcgtactctggttagtcaaagaggcaaaagaagggctcaacaccactagccagacgtcaaaaccaaatcagatcactaaatcagcacgagtgctgaaatcaaagctagtttatccagaaagaggcaaacgacttaacacagctagcgaaagctccaaaaggctcaaatttctccccctagctgatttcccttgaaaagagcacaagaatctcaaagtctattccccaagaaaggagttccaaaaattcagaatccccaaaaatccagaaatttctcccccttgttaggagcccaagaaagtcaaaggctctcccctttattgacaaatgaactcatcaaacacatccaagggtagaaacaaaaattccccctcgacaagagatcccctgagaaaatgcagagatgcaaaagagagagtagaaaatgtaggagctttagaattataccagtcagagtgtaaagatgctctaagtgatgttgtgctatgtgtgcaacaataaatgcacgtgctagtagacgctcaaactgatccacctttcaaagattttttaaagagtgatcatagaccaaagagcagtttcaatttggaacccttgatgttttgtttcggcaagtgccatagtccttggagctcagtagttttttttctcttggagcagtggggggtgagggtgtccattaatttagtagagaagagatttggacgacatgttggttagatagaagcagaagaactttatataaaagtgacgtgagtgaaaaccatgacaacttgtactttataatagtagggagaggggtgggtactggccaacggctagcgggtgacgcggagtcttgtaggcggtggcggatgagcacgactattaatatagtagagaagagatttggacgatagaagtagaaggatttttatgtataattattgaaaaactgtgataactgatgttttataaagatatagacagatatagagatttacaaccaatattaaaagagtatatattttagggataaaaaattaaaaattaccggtgtatttttttaattgaagtcgaggagattgatgcaggaaattgaccttttacacggaccgcaaggctaaacttctgcatggttcggttgaaagcgcctacaaaggcgtccctaggcctcctagcccgtgccgcgcaacgtccggctcggacaccggaggctttctcacgcgtcccgatcgcctccgtccattaaggtccgtgttcgatcggatggctttcgatgacgagggttttgccccagacggtacaaatacggagcctcccaccccgcgccgccaccgcgctctttctctttcctcacgacgccgccgttgggagccctgcttcgggagagccccaacccttatcaaaccctaaatcaaaaactacccaaaaaaatccgcaaaatccagaaaaaaatcccaaaaatcaccacttgattggagcccgggggatctcgactctagaggatcgctcaggaaggccgctgagatagaggcatggcggccaatgcgggcggcggtggagcgggaggaggcagcggcagcggcagcgtggctgcgccggcggtgtgccgccccagcggctcgcggtggacgccgacgccggagcagatcaggatgctgaaggagctctactacggctgcggcatccggtcgcccagctcggagcagatccagcgcatcaccgccatgctgcggcagcacggcaagatcgagggcaagaacgtcttctactggttccagaaccacaaggcccgcgagcgccagaagcgccgcctcaccagcctcgacgtcaacgtgcccgccgccggcgcggccgacgccaccaccagccaactcggcgtcctctcgctgtcgtcgccgccgccttcaggcgcggcgcctccctcgcccaccctcggcttctacgccgccggcaatggcggcggatcggctgtgctgctggacacgagttccgactggggcagcagcggcgctgccatggccaccgagacatgcttcctgcaggactacatgggcgtgacggacacgggcagctcgtcgcagtggccacgcttctcgtcgtcggacacgataatggcggcggccgcggcgcgggcggcgacgacgcgggcgcccgagacgctccctctcttcccgacctgcggcgacgacggcggcagcggtagcagcagctacttgccgttctggggtgccgcgtccacaactgccggcgccacttcttccgttgcgatccagcagcaacaccagctgcaggagcagtacagcttttacagcaacagcaacagcacccagctggccggcaccggcaaccaagacgtatcggcaacagcagcagcagccgccgccctggagctgagcctcagctcatggtgctccccttaccctgctgcagggagtatgtgagagcaacgcgagctgccactgctcttcactgatgtctctggaatggaaggaggaggaagtgagcatagcgttggtgcgttgctgtcaagggcgaattcacatggttaacctagacttgtccatcttctggattggccaacttaattaatgtatgaaataaaaggatgcacacatagtgacatgctaatcactataatgtgggcatcaaagttgtgtgttatgtgtaattactagttatctgaataaaagagaaagagatcatccatatttcttatcctaaatgaatgtcacgtgtctttataattctttgatgaaccagatgcatttcattaaccaaatccatatacatataaatattaatcatatataattaatatcaattgggttagcaaaacaaatctagtctaggtgtgttttgcgaatgcggccgccaccgcggtggagctcgaattccggtccgggcctagaaggccagcttcaagtttgtacaaaaaagcaggctccggccagaatctcactgactagctaaacagcggccgcatcgagcagctggcttgtggggaccagacaaaaaaggaatggtgcagaattgttaggcgcacctaccaaaagcatctttgcctttattgcaaagataaagcagattcctctagtacaagtggggaacaaaataacgtggaaaagagctgtcctgacagcccactcactaatgcgtatgacgaacgcagtgacgaccacaaaactcgagcaacgagatcatgagccaatcaaagaggagtgatgtagacctaaagcaataatggagccatgacgtaagggcttacgcccatacgaaataattaaaggctgatgtgacctgtcggtctctcagaacctttactttttatgtttggcgtgtatttttaaatttccacggcaatgacgatgtgaccgtcgacccactaaaacattgctttgtcaaaagctaaaaaagatgatgcccgacagccacttgtgtgaagcatgagaagccggtccctccactaagaaaattagtgaagcatcttccagtggtccctccactcacagctcaatcagtgagcaacaggacgaaggaaatgacgtaagccatgacgtctaatcccagggcccggtgaccaatcgaattagcttggcgcgtggaccgaagcttgcatgcctgcagtgcagcgtgacccggtcgtgcccctctctagagataatgagcattgcatgtctaagttataaaaaattaccacatattttttttgtcacacttgtttgaagtgcagtttatctatctttatacatatatttaaactttactctacgaataatataatctatagtactacaataatatcagtgttttagagaatcatataaatgaacagttagacatggtctaaaggacaattgagtattttgacaacaggactctacagttttatctttttagtgtgcatgtgttctcctttttttttgcaaatagcttcacctatataatacttcatccattttattagtacatccatttagggtttagggttaatggtttttatagactaatttttttagtacatctattttattctattttagcctctaaattaagaaaactaaaactctattttagtttttttatttaataatttagatataaaatagaataaaataaagtgactaaaaattaaacaaataccctttaagaaattaaaaaaactaaggaaacatttttcttgtttcgagtagataatgccagcctgttaaacgccgtcgacgagtctaacggacaccaaccagcgaaccagcagcgtcgcgtcgggccaagcgaagcagacggcacggcatctctgtcgctgcctctggacccctctcgagagttccgctccaccgttggacttgctccgctgtcggcatccagaaattgcgtggcggagcggcagacgtgagccggcacggcaggcggcctcctcctcctctcacggcaccggcagctacgggggattcctttcccaccgctccttcgctttcccttcctcgcccgccgtaataaatagacaccccctccacaccctctttccccaacctcgtgttgttcggagcgcacacacacacaaccagatctcccccaaatccacccgtcggcacctccgcttcaaggtacgccgctcgtcctcccccccccccctctctaccttctctagatcggcgttccggtccatgcatggttagggcccggtagttctacttctgttcatgtttgtgttagatccgtgtttgtgttagatccgtgctgctagcgttcgtacacggatgcgacctgtacgtcagacacgttctgattgctaacttgccagtgtttctctttggggaatcctgggatggctctagccgttccgcagacgggatcgatttcatgattttttttgtttcgttgcatagggtttggtttgcccttttcctttatttcaatatatgccgtgcacttgtttgtcgggtcatcttttcatgcttttttttgtcttggttgtgatgatgtggtctggttgggcggtcgttctagatcggagtagaattctgtttcaaactacctggtggatttattaattttggatctgtatgtgtgtgccatacatattcatagttacgaattgaagatgatggatggaaatatcgatctaggataggtatacatgttgatgcgggttttactgatgcatatacagagatgctttttgttcgcttggttgtgatgatgtggtgtggttgggcggtcgttcattcgttctagatcggagtagaatactgtttcaaactacctggtgtatttattaattttggaactgtatgtgtgtgtcatacatcttcatagttacgagtttaagatggatggaaatatcgatctaggataggtatacatgttgatgtgggttttactgatgcatatacatgatggcatatgcagcatctattcatatgctctaaccttgagtacctatctattataataaacaagtatgttttataattattttgatcttgatatacttggatgatggcatatgcagcagctatatgtggatttttttagcactgccttcatacgctatttatttgcttggtactgtttcttttgtcgatgctcaccctgttgtttggtgttacttctgcaggtcgactttaacttagcctaggatccatggccactgtgaacaactggctcgctttctccctctccccgcaggagctgccgccctcccagacgacggactccacactcatctcggccgccaccgccgaccatgtctccggcgatgtctgcttcaacatcccccaagattggagcatgaggggatcagagctttcggcgctcgtcgcggagccgaagctggaggacttcctcggcggcatctccttctccgagcagcatcacaaggccaactgcaacatgatacccagcactagcagcacagtttgctacgcgagctcaggtgctagcaccggctaccatcaccagctgtaccaccagcccaccagctcagcgctccacttcgcggactccgtaatggtggcttcctcggccggtgtccacgacggcggtgccatgctcagcgcggccgccgctaacggtgtcgctggcgctgccagtgccaacggcggcggcatcgggctgtccatgattaagaactggctgcggagccaaccggcgcccatgcagccgagggtggcggcggctgagggcgcgcaggggctctctttgtccatgaacatggcggggacgacccaaggcgctgctggcatgccacttctcgctggagagcgcgcacgggcgcccgagagtgtatcgacgtcagcacagggtggagccgtcgtcgtcacggcgccgaaggaggatagcggtggcagcggtgttgccggcgctctagtagccgtgagcacggacacgggtggcagcggcggcgcgtcggctgacaacacggcaaggaagacggtggacacgttcgggcagcgcacgtcgatttaccgtggcgtgacaaggcatagatggactgggagatatgaggcacatctttgggataacagttgcagaagggaagggcaaactcgtaagggtcgtcaagtctatttaggtggctatgataaagaggagaaagctgctagggcttatgatcttgctgctctgaagtactggggtgccacaacaacaacaaattttccagtgagtaactacgaaaaggagctcgaggacatgaagcacatgacaaggcaggagtttgtagcgtctctgagaaggaagagcagtggtttctccagaggtgcatccatttacaggggagtgactaggcatcaccaacatggaagatggcaagcacggattggacgagttgcagggaacaaggatctttacttgggcaccttcagcacccaggaggaggcagcggaggcgtacgacatcgcggcgatcaagttccgcggcctcaacgccgtcaccaacttcgacatgagccgctacgacgtgaagagcatcctggacagcagcgccctccccatcggcagcgccgccaagcgcctcaaggaggccgaggccgcagcgtccgcgcagcaccaccacgccggcgtggtgagctacgacgtcggccgcatcgcctcgcagctcggcgacggcggagccctggcggcggcgtacggcgcgcactaccacggcgccgcctggccgaccatcgcgttccagccgggcgccgccagcacaggcctgtaccacccgtacgcgcagcagccaatgcgcggcggcgggtggtgcaagcaggagcaggaccacgcggtgatcgcggccgcgcacagcctgcaggacctccaccacctgaacctgggcgcggccggcgcgcacgactttttctcggcagggcagcaggccgccgccgctgcgatgcacggcctgggtagcatcgacagtgcgtcgctcgagcacagcaccggctccaactccgtcgtctacaacggcggggtcggcgacagcaacggcgccagcgccgtcggcggcagtggcggtggctacatgatgccgatgagcgctgccggagcaaccactacatcggcaatggtgagccacgagcaggtgcatgcacgggcctacgacgaagccaagcaggctgctcagatggggtacgagagctacctggtgaacgcggagaacaatggtggcggaaggatgtctgcatgggggactgtcgtgtctgcagccgcggcggcagcagcaagcagcaacgacaacatggccgccgacgtcgggcatggcggcgcgcagctcttcagtgtctggaacgacacttaagcgtacctagtggtacctgacatcttatagtctgcaacctctcgtgtctgaattcctatctttatcaagtgttattgcttccacgactataggacagctttcgtcgaaagcttttgctcatgtgatctcgaaggattcatctagtctgatttttcgtgacttgtatcggttttattggattcatccaacatatatcaataaaaaatgagttgtgtttcctttcttcctagttcagttaaaattatttccctcctgcgcttgtgctgtaattgtctgtgtacctgttgtttgtgactgtgttagttcccttggatatgatttcgtatttgatatgtacatggagatagcttagcttcattattggagtatgaagttagtatgacatagtcactctcctggaaaattgacactgcaaaccatatttttattctgaaccacaaatcctagtcagtccgctggcatatgccgtccgtttgctgaatccagaacgtgggtttggagatgtacggctgagatgcctctatgcgaaggggatttcgtggtgaaacgagatgggagtagagcaacgcccgtggaagatgcttcaaacttccacacttttgagcaacgatcggcagtagtaaggtagacgatttcaagatcaaagcatatgaagataaacaacatcaacaacaaaatttgttggggttctatagagagaaacagagctacatacatacactgttttgtatctaccatctgagatgatgaaaagatgaaaaactaaagaatgccccggcgccaacgccaggacacgccgcgcgcgcgtcacccgagccatctcttgacccagccggcgctgtatatttacacacgttgcagcatcgatcaccacctgttcgatcgcgtcgccgtcaccggcgcgccgcgacttattgaactagtctagggcgcggctaacaacctagcttagattgccttgtctaaacccttaggctaacgcgccactctagaaggccgatctcccccgaacgcgccagatccgatatcgatgggccctggccgaagcttggtcacccggtccgggcctagaaggccgatctcccgggcacccagctttcttgtacaaagtggccgttaacggatcggccagaatggcccggaccgggttaccccgcggttcaaagccaatgactgttgttaggtccagtttctaaggacgaatcatccaatcactggttctttctgaacaaaacaaagagctatagagttacgttactgtagccgagacagagcctgcaatctggttatgccacatactaggttctttcttaaagttgactcactctatcctaagttctacttacaaggagctacaacaaattggtcataaccggagagcgttcaaggaggtaatatcccatcttactctgtagcaaggctacaaaaggagagctaaagaactaggctacaaaaagagagctaaagaactaactatctagcaagactacagagctatagtgtagagatttcataaccggtgagcgttcaaggatactttgaagagaagaggtaatatctcaactagcaagactacaaaaaaatggagatataaaactaactgtctaacaagactacagagctatagtagagatagatacgttcgacacttaagcatgagaattcgagctcggtaccctggttcacaaactcaatacaacacacagtggagtagggtattacgctccggcggcccgaaccactctaaatccttgtgtcctcgtgtgctcttccaccattaatgactgtaattgcagggacacgaagagttgtagcgcttttgccaacaagatccgctatatgctagtagagtggaacctgcacagcaacaagcatccaataatctgagaataagaattatgtgtggtgatggttctcatctctgcaactcgccattttcgcgagagaaccaaatccaagttggtgaagatcatgatttgggctcatgggctggcatagtagctattacctttgcaattgtggttcgaatctatccgatattctccttttcagggagagctaatgcttatgcttattgggtattttggtttgacactgcttcacgcccaaaaaaaggcaactatgtctgagttggatatggcccaaaaaaaggcagctatgtctgagttggatatggaagtcttctttcgtttagggtgaagtaagaccaagctcatgagcttattatcttaggtcggaacaaattagttgataggcatggcacatttatcaaattataatgattttaacagaaaagcaacacctctttttcagcagcaccagctttgcaagctgcaattgacactccaagcatagtatttgctccaaactcagcctgcatttcgcacaatatcatatctatttccatttggataaaatatattttccagaaatatgggaacagaatcaagatacagaaaaaagttgtggtagtagtggtaagtggaaacacaagtacagtgaaaagatagcattatttctgaacagtcaaattaaccgaaataagtagtatcacatactgcccctaaattgactacacccaatgtaaagaattgcttgagcatattgagccatcagttgtttgtttgtgtaacggatttgacaatgcagagttcaggagcaaaaaaccgcaaaggagagaaagagggaaaggatctcctagtatcccaccttgtggcgcgccctgtcaagtgcatgatggcctggtcgatctgcgtctgctgctgcggttccatcccaacgagtgcctccgacaccttgtcgttgatcacccgcaccgcgtaggcgacccccctggcgaggaacttccgcctctcggaggccccggccgcgtcggcggcggcgccctcgagcgcgcccacgctagccgtagatgctcggtgcacggccttgttggtgtgcaactcgacctcaacggccggtgcgctacgcccgtcaaggatctggcgcgcccgcaccctcgtgatcacggtgggcgcctcccgcctcatgtggccgacgatgaaaagcgccgggttaggggccttggcgcgcaccgccgtattcagggcctcctcgctcttgcgcgagagcaggtgcttccccaggtactcctgcactgacaaggctgccacagcggtggaatttgtcctcacgacttcgccacgtcgtcctcacctccctggcttcccacgactccgccgtatcgaggtgctcggtgggtcgtcttaatccgaagtccgaactaggaagacgagacagagaggtctgaggaatgggcctcgtttgatgttgagctgaattatttttccagcataagcccaggtcttggtccatgaacaaaattactagaaacccagcccagtactacgatctaaaagagggactgccactggatagctctctctagcattctccacgctccaatacagcggcgtcgtgtctatccgggtctatccgcgaacacgtgagaactctccagaaactgctttctcctccacttcatctctctcgctttccctctataaaaagaccccttctaggaattgagggagacagcaagcaccaagcagcgatccgaagctcaatcaattcactcaaacctcttccccaaatcttcgattagatcttcgttgacaagaagactagaaccgaacctgacatgtccaacctgctcacggttcaccagaaccttccggctcttccagtggacgcgacgtccgatgaagtcaggaagaacctcatggacatgttccgcgacaggcaagcgttcagcgagcacacctggaagatgctgctctccgtctgccgctcctgggctgcatggtgcaagctgaacaacaggaagtggttccccgctgagcccgaggacgtgagggattaccttctgtacctgcaagcgcgaggtttgtttctgcttctacctttgatatatatataataattatcattaattagtagtaatataatatttcaaatatttttttcaaaataaaagaatgtagtatatagcaattgcttttctgtagtttataagtgtgtatattttaatttataacttttctaatatatgaccaaaacatggtgatgcctaggtctggcagtgaagaccatccagcaacaccttggacaactgaacatgcttcacaggcgctccggcctcccgcgccccagcgactcgaacgccgtgagcctcgtcatgcgccgcatcaggaaggaaaacgtcgatgccggcgaaagggcaaagcaggccctcgcgttcgagaggaccgatttcgaccaggtccgcagcctgatggagaacagcgacaggtgccaggacattaggaacctggcgttcctcggaattgcatacaacacgctcctcaggatcgcggaaattgcccgcattcgcgtgaaggacattagccgcaccgacggcggcaggatgcttatccacattggcaggaccaagacgctcgtttccaccgcaggcgtcgaaaaggccctcagcctcggagtgaccaagctcgtcgaacgctggatctccgtgtccggcgtcgcggacgacccaaacaactacctcttctgccgcgtccgcaagaacggggtggctgcccctagcgccaccagccaactcagcacgagggccttggaaggtattttcgaggccacccaccgcctgatctacggcgcgaaggatgacagcggtcaacgctacctcgcatggtccgggcactccgcccgcgttggagctgctagggacatggcccgcgccggtgtttccatccccgaaatcatgcaggcgggtggatggacgaacgtgaacattgtcatgaactacattcgcaaccttgacagcgagacgggcgcaatggttcgcctcctggaagatggtgactgaggtacccaacctagacttgtccatcttctggattggccaacttaattaatgtatgaaataaaaggatgcacacatagtgacatgctaatcactataatgtgggcatcaaagttgtgtgttatgtgtaattactagttatctgaataaaagagaaagagatcatccatatttcttatcctaaatgaatgtcacgtgtctttataattctttgatgaaccagatgcatttcattaaccaaatccatatacatataaatattaatcatatataattaatatcaattgggttagcaaaacaaatctagtctaggtgtgttttgcgatccgatatcgaattggccacggtaccagctgctgctgttctagggttcacaagtctgcctatttgtcttccccaatggagctatggttgtctggtctggtccttggtcgtgtcccgtttcattgtgtactatttacctgtaatgtgtatccttaagtctggtttgatggtgtctgaaacgttttgctgtggtagagcagcatggaagaactataatgaataagtgatccctaatcattgtgtccaaattttgcttctgctatacccttttgtgctgtttcttatgttttgcttaaaaatttgatctgacaaacaaatttgtctaaattatgctcttgttctgactgtgtactgtacacatttgtattgctaccggtttggcacatagttttctctttgattgcagatcaaacccttctgattgcagattgcttggctatggctgatgtgctcactgttcttctttagcttgtatattgctgatggtggcttggctacggctgaaaaagttgctgctgcgccgacttggcaactgttgctccagtaatgctttgtcctctcttcctagccgccgacttggcacttggcagctgttgctcctgtaatgcgttgttatctcttatctcttgagatgtactatgattttgaggctgtttgacttgtgccagattgccagtgctgatgctatattatctcaggtttttatgctagtatatgttttactgtgtgctgcctgtgtcgagttacgtaatctattgaaccgctatgcgtgttgatgccctgttgttgcttgccagattgatgcccctgttgcttgcagcttgcaagctgtagtgaaatcctaaaattccaaaccaaatctattctgaacttttgaagatctgtgatgtccggaagaaaagattcaaacagataaacgggactctccagaatctataaaataaatgatcgacaaacgctttgctttggtaggcttcaagcttggtcacccggtccgggcctagaaggccagcttcggccgccccgggcaactttattatacaaagttgatagataaatcagatatctggttcctaaggacccggcggaccgattaaactgattcggtccgacgcgttacctaataacttcgtatagcatacattatacgaagttattagctaactaactagtaagcttaagccatgggtcgacggatccgttaactagcgtggcatttggcaccgccgcacactatgcgagctaggagtgctagtttacagatgaaactatgaaaccaagaaaacacaattgtccgtagctagcgcgtggcgtcgtgtcaagcttcacacagtatcttcgttcttcactataaatcgcgcctgttgttcgtgagacccaccaccgtggataacagtcccctaataataagcgatcaacagcactgctgatggctgaacaccgaggcgccgccgcgcgtaaccatccgccggagcagcccgtcgtgccggcgaacgacgccttccccgaccgcgcccagcagctctgcctcgacgccgggcgcgcgctcgcgatgtgcggcgtgctcgtcgccgtccctcccgcattttacgcgtcgacgtcgcggacgacaccgcacttgccttcgtcggcttcgtcctctggatcatcggtgcgtggctgtgcctcctggcgctcacgcccttggctccacgggcggtgagggcgggcggggccgccgccagcaccttgctgatcaggtgcctgtccctttcatgaactactagcgcccgcgcccgcggccgccgggcacaagagaacacatcgatgttcgctgcgtacgtcagcaataaggcactctttgtcagtagtcgagtgcatatgttgggtgtttgccctgggagatttcaagtgttgtggccattatcccgcaggataaaaaatcggcggcttttggattgatacggaaaataacgatgtttcatgctcgtgttgtgtgtgtgacatcttgtcagccaagtttttaaccgttgctactccccctctgtgggctcagtgtgtggaccggaatacgtcgtacataggccgtagcctaagcccaatatgccgtttttcaggttggcctgtgtgacgacaagcgggtctcaaaagcccatcacgcaactggcctgcaattattggaggagagcgcgtcgagttggttccagaggctgcgtggtggggccggactctgcgacgacctctcgttcgcgtccgatttggttgccgtgagccgtgacgtaacgcctccttccgttcctccctatataagttccacccccgggtccggtttccccaagccccagtgacccccgatcccgatcgcgaaatctccgcacccgccggcaagggaccgaagcaagcctctctcccgaccgtcgcatcaaggtacgcgtccgctcgatctgtcctcttccttctcgatttgacttgctgtggtgcccgatcacgggatcagaatcgcaccagtgtagatttcgcatgttctaagatgtgttagtttccaggctaatccagttctcttgacgcccgatccgatcgagctccgtgtttatttcagcctaatcgtagtattcccctaaaatttcctcattagggggttcgcaagattgttggtcgacaggttcacttatgctcgatcgcttacttttagtcgattcatgctgcgtactattgttgccccccgtggttttatcttttctcgtgtgaaatccagtagatatagtagatatcgtagcattaggttttaattcaatcgattgattattgtatcatcaaaattgagaagttcgaatcatgcctatcatgctgcctcaaccgaaatcctgtatattgaagtttcaattcaattgattgatcattcattagattcaaccaaaatctagaaggttagatgacgcatgtcatgctgcctgcgtagtttacctttgatctgtttatgattaccttatcagtaggatatttgtgattttgggaagtagcactaactgattcatgctgacatgatgttccctttcagattatactgttgagtcctatctaattgatgctttgtatgctatatgaatacgtcatggtaaattagcagttaattagcatattagcaattgggcgtacctcatcaggattgctcttgtagatgtgtgtggtgatgtttcttgttcaattcatgttctgctttaaaagtatgtgttctctgtttgttaattaagattcatggttataatgatttggacctaattaatcagggttgcccttttagatgcgtggttacttgttgagttcatttttttcctgctatagttgtatgcgtttgttcattcatggttagatttgatttgtttcttctctattccatgccttccatatacttcaattgtagcttaacatgagatttctgtatatgcaggtcgaccgccggggatccacacgacaccatggcccagtccaagcacggcctgaccaaggagatgaccatgaagtaccgcatggagggctgcgtggacggccacaagttcgtgatcaccggcgagggcatcggctaccccttcaagggcaagcaggccatcaacctgtgcgtggtggagggcggccccttgcccttcgccgaggacatcttgtccgccgccttcatgtacggcaaccgcgtgttcaccgagtacccccaggacatcgtcgactacttcaagaactcctgccccgccggctacacctgggaccgctccttcctgttcgaggacggcgccgtgtgcatctgcaacgccgacatcaccgtgagcgtggaggagaactgcatgtaccacgagtccaagttctacggcgtgaacttccccgccgacggccccgtgatgaagaagatgaccgacaactgggagccctcctgcgagaagatcatccccgtgcccaagcagggcatcttgaagggcgacgtgagcatgtacctgctgctgaaggacggtggccgcttgcgctgccagttcgacaccgtgtacaaggccaagtccgtgccccgcaagatgcccgactggcacttcatccagcacaagctgacccgcgaggaccgcagcgacgccaagaaccagaagtggcacctgaccgagcacgccatcgcctccggctccgccttgccctccggactcagatctcgatagagtcaacctagacttgtccatcttctggattggccaacttaattaatgtatgaaataaaaggatgcacacatagtgacatgctaatcactataatgtgggcatcaaagttgtgtgttatgtgtaattactagttatctgaataaaagagaaagagatcatccatatttcttatcctaaatgaatgtcacgtgtctttataattctttgatgaaccagatgcatttcattaaccaaatccatatacatataaatattaatcatatataattaatatcaattgggttagcaaaacaaatctagtctaggtgtgttttgcgaattgcggcgcccttactttaacgcctctaaccaacacccctttatctttataaggaacaataaacagaatttgccccactgttctaaatcacctaataatatccccagctaaaaacaataaaggtttcctagaattaagacaagcatgactgttcctccaggagggtttggaacattgttgcagtcttgcagatacgggcgaagggtgagaaacagagcggagggctggaggtgacctcggtagtcgacgccggagttgagcttgacaacgacggggcggcccctgatggacttgaggaagtccgatggcgtcttcaccgtcccgccggcgcccgaggcgggcctgtcgctgccgccgccgccgctgctcatcttgcgcgctgtgcccccggcggtgtccctgtgttgcggatcgcgggtgggccaggtggatgcgagggcgacccgtttggactccggccggagccgccggatccctggtcggtgtcagtgccgtttactctgggccccacgtgtcagtaccgtctgtagatgacaacaacccgtcgtccacagtcatgtccaaaatatcctttcttcttttttttcgattcggatatctatcttccttttttttttccaaaaatcttcttgacgcaccagcgcgcacgtttgtggtaaacgccgacacgtcggtcccacgtcgatagaccccacccaccagtgagtagcgtgtacgtattcgggggtgacggacgtgtcgccgtcgtcttgctagtcccattcccatctgagccacacatctctgaacaaaaaaaaggagggaggcctccacgcacatccccctccgtgccacccgccccaaaccctcgcgccgcctccgagacagccgccgcaaccatggccaccgccgccgccgcgtctaccgcgctcactggcgccactaccgctgcgcccaaggcgaggcgccgggcgcacctcctggccacccgccgcgccctcgccgcgcccatcaggtgctcagcggcgtcacccgccatgccgatggctcccccggccaccccgctccggccgtggggccccaccgagccccgcaagggtgctgacatcctcgtcgagtccctcgagcgctgcggcgtccgcgacgtcttcgcctaccccggcggcgcgtccatggagatccaccaggcactcacccgctcccccgtcatcgccaaccacctcttccgccacgagcaaggggaggcctttgccgcctccggctacgcgcgctcctcgggccgcgtcggcgtctgcatcgccacctccggccccggcgccaccaacctagtctccgcgctcgccgacgcgctgctcgattccgtccccatggtcgccatcacgggacaggtggcgcgacgcatgattggcaccgacgccttccaggagacgcccatcgtcgaggtcacccgctccatcaccaagcacaactacctggtcctcgacgtcgacgacatcccccgcgtcgtgcaggaggctttcttcctcgcctcctctggtcgaccagggccggtgcttgtcgacatccccaaggacatccagcagcagatggcggtgcctgtctgggacaagcccatgagtctgcctgggtacattgcgcgccttcccaagccccctgcgactgagttgcttgagcaggtgctgcgtcttgttggtgaatcgcggcgccctgttctttatgtgggcggtggctgcgcagcatctggtgaggagttgcgacgctttgtggagctgactggaatcccggtcacaactactcttatgggcctcggcaacttccccagcgacgacccactgtctctgcgcatgctaggtatgcatgggacggtgtatgcaaattatgcagtggataaggccgatctgttgcttgcacttggtgtgcggtttgatgatcgcgtgacagggaagattgaggcttttgcaagcagggctaagattgtgcacgttgatattgatccggctgagattggcaagaacaagcagccacatgtgtccatctgtgcagatgttaagcttgctttgcagggcatgaatgctcttcttgaaggaagcacatcaaagaagagctttgactttggctcatggaacgatgagttggatcagcagaagagggaattcccccttgggtataaaacatctaatgaggagatccagccacaatatgctattcaggttcttgatgagctgacgaaaggcgaggccatcatcggcacaggtgttgggcagcaccagatgtgggcggcacagtactacacttacaagcggccaaggcagtggttgtcttcagctggtcttggggctatgggatttggtttgccggctgctgctggtgcttctgtggcaaacccaggtgtcactgttgttgacatcgatggagatggtagctttctcatgaacgttcaggagctagctatgatccgaattgagaacctcccagtgaaggtctttgtgctaaacaaccagcacctggggatggtggtgcagttggaggacaggttctataaggccaacagagcgcacacatacttgggaaacccagagaatgaaagtgagatatatccagatttcgtgacgatcgccaaagggttcaacattccagcggtccgtgtgacaaagaagaacgaagtccgcgcagcgataaagaagatgctcgagactccagggccgtacctcttggatataatcgtcccacaccaggagcatgtgttgcctatgatccctagtggtggggctttcaaggatatgatcctggatggtgatggcaggactgtgtactgactagctagtcagttaacagatctgccagatcctcggtgtacaaataacccgtcttatcctatgagacgggccggcgtcagtgtgttctggaggaatttttatgtcagagcctttttctttgtgtgcttgatgtagatgccaagggaagcttattggctgttgaagcttgatgcaaaataaattatggaactctgttttttgtttatctaataataactagcaaatatgcttccattgcattgaaactaacagccttttgtgtttccaagttttattttgtgacaatgtcatctatttcaattagttgtggaatcggaaacttgcaggactaacttggaaactccaatccctcagcatcctggactttttcctggtgtaatccatgtagatattattttaatcatcattttagttctggaggtttttccatctccggttttgctcccctttcttcaaaaaaaaaaaaaaaatgccgtaggcgccgcaacgcccacctgttgttcaaactcatgggcacgagtggctcgaagattttatacaacaattgctgtagtttcaccgttgctggtgaagaagcatttttttaaaaaaatatagtggtattcattttaattagtttagttgtgcagcgagcaaaatttggacatgctctgctcggaatctgatcgacctagacacagattagcagcagtagctttgtcatctgttccaagagttgcgatctgatagaagaaaaaaaaaccttcccttcaatgtaaaaccgaaactaacaagaaagaagcacagtgccgtttaggcaagtatggagtacgtattaagcatgtagaaggccatgcatgaaccactaacaagaaagaagcgcagtgccattcaggcaagcataagcatgtagattggcatgcatgaacaactaacagtagatcgtctctggtctgattagaagttttttgggaagccaagaaatcatgtacaactggttccatctcaaattccgtggcaaaaagaggcctaagcaacatacctcgagtagatcacattcaagcttggtcacccggtccgtcaatattctgattccgatgacttcgtaggttcctagctcaagccgctcgtgtccaagcgtcacttacgattagctaatgattacggcatctaggaccgactagtggcgcgccgactagctagctaaggtaccgagctcgaattcattccgattaatcgtggcctcttgctcttcaggatgaagagctatgtttaaacgtgcaagcgctactagacaattcagtacattaaaaacgtccgcaatgtgttattaagttgtctaagcgtcaatttgtttacaccacaatatatcctgcca

SEQ ID NO: 281 - DNA, 24716 bp, synthetic construct
  misc_feature 1..24716: note = PHP99810
  source 1..24716: mol_type = other DNA
gtttacccgccaatatatcctgtcaaacactgatagtttaaactgaaggcgggaaacgacaatctgatcatgagcggagaattaagggagtcacgttatgacccccgccgatgacgcgggacaagccgttttacgtttggaactgacagaaccgcaacgttgaaggagccactcagcaagctggtacgattgtaatacgactcactatagggcgaattgagcgctgtttaaacgctcttcaactggaagagcggttacgctgtttaaacgctcttcaactggaagagcggttactaccggttcactagctagctgctaatcgagctagttaccctatgaggtgacatgaagcgctcacggttactatgacggttagcttcacgactgttggtggcagtagcgtacgacttagctatagttccggacttacccttaagcgatttaaatctgcggttaccgaattcgagctcggtacctagtacccttgtacttttggtttcacctgcatagagaaaacccacaagaatatgacagtctgatttgtcagtctcattctcaagcaacatttctctatccgttactttcatggtgaataacacaatccatcatcaatactttgtgttactcagaaactgaaagttattccgagtcttgcatatctttggacctactcgtttttctaccattattgctgattgttaagctctcgctacttgaatcggcattgttggagtgggaaggttcaaaaaattggagttatgactagttgtctctttctatgtacgatggagaaaatgaataaacaactgagaaaatggctcttgtttagttgatgatgctcttaagctttccactggttgccatatatgatttgggcatttcactttgatcttaatgggccttgtaaagcccaagactcatgattatctttagttgatgctcttaattaggtgtgggcaaataattcaaactgtatgtacccgaccaaaaccaaagcaaaaataatcgaaccaaaccgaaaatttaaaaataaccgaatgaaaactaaatcctataactgaaagaactgaaaccgaatcaaaatatttaatgtaaccaaaaatatccgaaatataattatattgtcaaaaatattaataatttctagattaaataattaaaaatacttaaaaatttatataaaatagtaaaaatactcgaaaataaccacaaatattcaaaaacaaccgaaatatcccaaaatattcaaagcaaaataaccgaatggataccaaattttaaaaccgaaaaaactggaacaaaaccaaaatcgaaccaaaatttcaaaaatcgaataaatactaaactttagaacaaaaaaaaacgataaccgaatgtatacgaaccaaagccgaattagataaccgaacgtccaggactactcttaatctttccgccacttatgatttgggctattactttgtttataatgagccttttcaagctcaagttcatgattgtccgtgagatgagaaactgacttgttggattcgaaaccctagctagtattggttaatacttaatacataaatgacctgcattgacatcatcatccaagaaaataaaaattgtatgcttgagatatttagttttcctagctaggttttctttattttagtaccgaatctttaggtgtgccacgttaatttagacccattttttcatacttaccaactgagtctagtttaatcatgactataatcgtataaaatgattcagtcgacgtcattgcgaacgtatataaaatcatccaaattgacgtcattccaaagaggtaagcatgcttatctaagagtccgagcatactaaacaagacgacattttatttgcactccaaatcaaattttgtattgcctaaagaaaaacaatcaaactcaagtttcttaaaattaatttcattcaaactaatcactttcaatatctcacatattattcatgccatttctatttgtctaaacatgatttaaaaaaaaaagtaaaatacaaagattactatgcaaaaactctataaaaaaaaattcaaatttcttatttatttgtgacatcaaattttcaaaataatttttttaattatcggttgatccggtcagtcgataaaaacataaactttcagcgaccgttaaaactttcctactaccgatttagagaaaatcttagcttgaaacgtaattgtaacctgccttcatgcaagtcgcaagatatgtcatcctaagttgtatatgttttctcaaaagatgtatttacttgagaaaatacgtttcaacgttgatggacaaccaattaagaatcaagcacctttcgtaatcaatttaggcttatcgtctaaggtatactgatttacgacagttgactagacttataaggaacaaaataatagaatagtttctaaacacttcacctaatcatagagactaagatggtaattcgtaaacgacaaagcctagtgacactgtccattgtaaaattccacatcatattagtattaaacatatacatgtagtttcctgaacacatgtagtatcaaacacacttcgtggcttcttcctcgaaacctgcggccgcgctatagttccggacttacccttaagataacttcgtatagcatacattatacgaagttatgggcccacgcgtgaagagcggttaccagagctggtcacctttgtccaccaagatggaactgtcttcggccagaatggccatctggattcagcaggcctagaaggccatttatcgctatcaactttgtatagaaaagttgggccgaattcgagctcggtacggccagaatggcccggaccgaagcttccggatagtgtccggtgcgccagccacgtcaccaggccgttgggttccgaccgttggagctctgacttgtgggcccgcctgacatgtccggtgaattatagcggagcggattcccgaagctagcgggttcagagtcgctctcctctggagcaccggacagtccgttgaattatagcgaagcgtctctgagaatcccgaaggtgatgagttcagcttggagttccctggtgcaccggacagtccggtgcgccagaccagggcacacttcggttatcccttgctctctttgttgaacccttttcttggtctttttattggcttatgtgaacctttggcacctgtagaacttatagactagagcaaactagttagtccaattatttgtgttgggcaattcaaccaccaaaaccaattaggaaataggtgtaagcctaattccctttcaaatagggactccaatactcgctaaccgatgctaaatcccttattagggttaggatatcagacaaaaagtctccccattggtataaatatgagacaaaatattcacccattaggtaagcagaaatgggtttggaaagaaatcatccaaaaccaattaaccatgagtaatattcacctagtgaaattaaatgtgtgtcctaatagataataagcacaacaactaactcaatctctttcaactaacttaatctctttcaacccttttaagcacccatccacctagcctaggtggtcagccactagccgtcccatccactagtccatatgttttttttttgtgttttgctgttttgtatggttaaacatatttttttattaaatgtcagatttattggtagtgtattattgttaggtgccgtgtgactgttaatgtcatatgaaatataatttaatagtgttttccttgtcatggatgaggacccattgagaccctatatcagaataaggatgtgtatgagatgaatcttatatcataatagatataagtatgaaaatagggatgtgtataacttcatgagaccgtgtccaacaaggacctgtatgtggttctgtacgccaaatttacaggacgccgagctcctttgttggtccagcaacggacggtaaagcctccggtaaaataccggacgctgcctgcgcatgctacatttagcgtttcactgtgcgtccgctacgcagccggccagcaggggcatagtgctgatacgacaaggatggcccacatgcagctcgtgggaccaggagctcacaggaggaggcaacgacattggaacatgggtcgggcccacagttgtcaaaaaatatagaatataggatatagaggaggaaatttagagaacgctgctggagatggtagagatatagaggatgtaatattttagagtgtactgtaaaggacgaaaaatatttttttagaggatgaaatttaaaggacgttgctgaagatagcctgaggatgagtactagatgtctggagtctgaacctggtggagaattccccacagaaggagaaggaaaataaactagggtttagccggggccacacggcaggctccacggcgtggttatgtccgcctttattctccccccactcgtctgcttcgcctccacctatccgccgcctcccaatcatcctgcccccaaactcccaccccgcagcatccccacgccaccacacctcgtcgcgtcgcgtcgtcaccggcgtgaagcccgggggatctcgactctagaggatcgctcaggaaggccgctgagatagaggcatggcggccaatgcgggcggcggtggagcgggaggaggcagcggcagcggcagcgtggctgcgccggcggtgtgccgccccagcggctcgcggtggacgccgacgccggagcagatcaggatgctgaaggagctctactacggctgcggcatccggtcgcccagctcggagcagatccagcgcatcaccgccatgctgcggcagcacggcaagatcgagggcaagaacgtcttctactggttccagaaccacaaggcccgcgagcgccagaagcgccgcctcaccagcctcgacgtcaacgtgcccgccgccggcgcggccgacgccaccaccagccaactcggcgtcctctcgctgtcgtcgccgccgccttcaggcgcggcgcctccctcgcccaccctcggcttctacgccgccggcaatggcggcggatcggctgtgctgctggacacgagttccgactggggcagcagcggcgctgccatggccaccgagacatgcttcctgcaggactacatgggcgtgacggacacgggcagctcgtcgcagtggccacgcttctcgtcgtcggacacgataatggcggcggccgcggcgcgggcggcgacgacgcgggcgcccgagacgctccctctcttcccgacctgcggcgacgacggcggcagcggtagcagcagctacttgccgttctggggtgccgcgtccacaactgccggcgccacttcttccgttgcgatccagcagcaacaccagctgcaggagcagtacagcttttacagcaacagcaacagcacccagctggccggcaccggcaaccaagacgtatcggcaacagcagcagcagccgccgccctggagctgagcctcagctcatggtgctccccttaccctgctgcagggagtatgtgagagcaacgcgagctgccactgctcttcactgatgtctctggaatggaaggaggaggaagtgagcatagcgttggtgcgttgctgtcaagggcgaattcacatggttaacctagacttgtccatcttctggattggccaacttaattaatgtatgaaataaaaggatgcacacatagtgacatgctaatcactataatgtgggcatcaaagttgtgtgttatgtgtaattactagttatctgaataaaagagaaagagatcatccatatttcttatcctaaatgaatgtcacgtgtctttataattctttgatgaaccagatgcatttcattaaccaaatccatatacatataaatattaatcatatataattaatatcaattgggttagcaaaacaaatctagtctaggtgtgttttgcgaatgcggccgccaccgcggtggagctcgaattccggtccgggcctagaaggccagcttcaagtttgtacaaaaaagcaggctccggccagaatctcactgactagctaaacagcggccgcatcgagcagctggcttgtggggaccagacaaaaaaggaatggtgcagaattgttaggcgcacctaccaaaagcatctttgcctttattgcaaagataaagcagattcctctagtacaagtggggaacaaaataacgtggaaaagagctgtcctgacagcccactcactaatgcgtatgacgaacgcagtgacgaccacaaaactcgagcaacgagatcatgagccaatcaaagaggagtgatgtagacctaaagcaataatggagccatgacgtaagggcttacgcccatacgaaataattaaaggctgatgtgacctgtcggtctctcagaacctttactttttatgtttggcgtgtatttttaaatttccacggcaatgacgatgtgaccgtcgacccactaaaacattgctttgtcaaaagctaaaaaagatgatgcccgacagccacttgtgtgaagcatgagaagccggtccctccactaagaaaattagtgaagcatcttccagtggtccctccactcacagctcaatcagtgagcaacaggacgaaggaaatgacgtaagccatgacgtctaatcccagggcccggtgaccaatcgaattagcttggcgcgtggaccgaagcttgcatgcctgcagtgcagcgtgacccggtcgtgcccctctctagagataatgagcattgcatgtctaagttataaaaaattaccacatattttttttgtcacacttgtttgaagtgcagtttatctatctttatacatatatttaaactttactctacgaataatataatctatagtactacaataatatcagtgttttagagaatcatataaatgaacagttagacatggtctaaaggacaattgagtattttgacaacaggactctacagttttatctttttagtgtgcatgtgttctcctttttttttgcaaatagcttcacctatataatacttcatccattttattagtacatccatttagggtttagggttaatggtttttatagactaatttttttagtacatctattttattctattttagcctctaaattaagaaaactaaaactctattttagtttttttatttaataatttagatataaaatagaataaaataaagtgactaaaaattaaacaaataccctttaagaaattaaaaaaactaaggaaacatttttcttgtttcgagtagataatgccagcctgttaaacgccgtcgacgagtctaacggacaccaaccagcgaaccagcagcgtcgcgtcgggccaagcgaagcagacggcacggcatctctgtcgctgcctctggacccctctcgagagttccgctccaccgttggacttgctccgctgtcggcatccagaaattgcgtggcggagcggcagacgtgagccggcacggcaggcggcctcctcctcctctcacggcaccggcagctacgggggattcctttcccaccgctccttcgctttcccttcctcgcccgccgtaataaatagacaccccctccacaccctctttccccaacctcgtgttgttcggagcgcacacacacacaaccagatctcccccaaatccacccgtcggcacctccgcttcaaggtacgccgctcgtcctcccccccccccctctctaccttctctagatcggcgttccggtccatgcatggttagggcccggtagttctacttctgttcatgtttgtgttagatccgtgtttgtgttagatccgtgctgctagcgttcgtacacggatgcgacctgtacgtcagacacgttctgattgctaacttgccagtgtttctctttggggaatcctgggatggctctagccgttccgcagacgggatcgatttcatgattttttttgtttcgttgcatagggtttggtttgcccttttcctttatttcaatatatgccgtgcacttgtttgtcgggtcatcttttcatgcttttttttgtcttggttgtgatgatgtggtctggttgggcggtcgttctagatcggagtagaattctgtttcaaactacctggtggatttattaattttggatctgtatgtgtgtgccatacatattcatagttacgaattgaagatgatggatggaaatatcgatctaggataggtatacatgttgatgcgggttttactgatgcatatacagagatgctttttgttcgcttggttgtgatgatgtggtgtggttgggcggtcgttcattcgttctagatcggagtagaatactgtttcaaactacctggtgtatttattaattttggaactgtatgtgtgtgtcatacatcttcatagttacgagtttaagatggatggaaatatcgatctaggataggtatacatgttgatgtgggttttactgatgcatatacatgatggcatatgcagcatctattcatatgctctaaccttgagtacctatctattataataaacaagtatgttttataattattttgatcttgatatacttggatgatggcatatgcagcagctatatgtggatttttttagcactgccttcatacgctatttatttgcttggtactgtttcttttgtcgatgctcaccctgttgtttggtgttacttctgcaggtcgactttaacttagcctaggatccatggccactgtgaacaactggctcgctttctccctctccccgcaggagctgccgccctcccagacgacggactccacactcatctcggccgccaccgccgaccatgtctccggcgatgtctgcttcaacatcccccaagattggagcatgaggggatcagagctttcggcgctcgtcgcggagccgaagctggaggacttcctcggcggcatctccttctccgagcagcatcacaaggccaactgcaacatgatacccagcactagcagcacagtttgctacgcgagctcaggtgctagcaccggctaccatcaccagctgtaccaccagcccaccagctcagcgctccacttcgcggactccgtaatggtggcttcctcggccggtgtccacgacggcggtgccatgctcagcgcggccgccgctaacggtgtcgctggcgctgccagtgccaacggcggcggcatcgggctgtccatgattaagaactggctgcggagccaaccggcgcccatgcagccgagggtggcggcggctgagggcgcgcaggggctctctttgtccatgaacatggcggggacgacccaaggcgctgctggcatgccacttctcgctggagagcgcgcacgggcgcccgagagtgtatcgacgtcagcacagggtggagccgtcgtcgtcacggcgccgaaggaggatagcggtggcagcggtgttgccggcgctctagtagccgtgagcacggacacgggtggcagcggcggcgcgtcggctgacaacacggcaaggaagacggtggacacgttcgggcagcgcacgtcgatttaccgtggcgtgacaaggcatagatggactgggagatatgaggcacatctttgggataacagttgcagaagggaagggcaaactcgtaagggtcgtcaagtctatttaggtggctatgataaagaggagaaagctgctagggcttatgatcttgctgctctgaagtactggggtgccacaacaacaacaaattttccagtgagtaactacgaaaaggagctcgaggacatgaagcacatgacaaggcaggagtttgtagcgtctctgagaaggaagagcagtggtttctccagaggtgcatccatttacaggggagtgactaggcatcaccaacatggaagatggcaagcacggattggacgagttgcagggaacaaggatctttacttgggcaccttcagcacccaggaggaggcagcggaggcgtacgacatcgcggcgatcaagttccgcggcctcaacgccgtcaccaacttcgacatgagccgctacgacgtgaagagcatcctggacagcagcgccctccccatcggcagcgccgccaagcgcctcaaggaggccgaggccgcagcgtccgcgcagcaccaccacgccggcgtggtgagctacgacgtcggccgcatcgcctcgcagctcggcgacggcggagccctggcggcggcgtacggcgcgcactaccacggcgccgcctggccgaccatcgcgttccagccgggcgccgccagcacaggcctgtaccacccgtacgcgcagcagccaatgcgcggcggcgggtggtgcaagcaggagcaggaccacgcggtgatcgcggccgcgcacagcctgcaggacctccaccacctgaacctgggcgcggccggcgcgcacgactttttctcggcagggcagcaggccgccgccgctgcgatgcacggcctgggtagcatcgacagtgcgtcgctcgagcacagcaccggctccaactccgtcgtctacaacggcggggtcggcgacagcaacggcgccagcgccgtcggcggcagtggcggtggctacatgatgccgatgagcgctgccggagcaaccactacatcggcaatggtgagccacgagcaggtgcatgcacgggcctacgacgaagccaagcaggctgctcagatggggtacgagagctacctggtgaacgcggagaacaatggtggcggaaggatgtctgcatgggggactgtcgtgtctgcagccgcggcggcagcagcaagcagcaacgacaacatggccgccgacgtcgggcatggcggcgcgcagctcttcagtgtctggaacgacacttaagcgtacctagtggtacctgacatcttatagtctgcaacctctcgtgtctgaattcctatctttatcaagtgttattgcttccacgactataggacagctttcgtcgaaagcttttgctcatgtgatctcgaaggattcatctagtctgatttttcgtgacttgtatcggttttattggattcatccaacatatatcaataaaaaatgagttgtgtttcctttcttcctagttcagttaaaattatttccctcctgcgcttgtgctgtaattgtctgtgtacctgttgtttgtgactgtgttagttcccttggatatgatttcgtatttgatatgtacatggagatagcttagcttcattattggagtatgaagttagtatgacatagtcactctcctggaaaattgacactgcaaaccatatttttattctgaaccacaaatcctagtcagtccgctggcatatgccgtccgtttgctgaatccagaacgtgggtttggagatgtacggctgagatgcctctatgcgaaggggatttcgtggtgaaacgagatgggagtagagcaacgcccgtggaagatgcttcaaacttccacacttttgagcaacgatcggcagtagtaaggtagacgatttcaagatcaaagcatatgaagataaacaacatcaacaacaaaatttgttggggttctatagagagaaacagagctacatacatacactgttttgtatctaccatctgagatgatgaaaagatgaaaaactaaagaatgccccggcgccaacgccaggacacgccgcgcgcgcgtcacccgagccatctcttgacccagccggcgctgtatatttacacacgttgcagcatcgatcaccacctgttcgatcgcgtcgccgtcaccggcgcgccgcgacttattgaactagtctagggcgcggctaacaacctagcttagattgccttgtctaaacccttaggctaacgcgccactctagaaggccgatctcccccgaacgcgccagatccgatatcgatgggccctggccgaagcttggtcacccggtccgggcctagaaggccgatctcccgggcacccagctttcttgtacaaagtggccgttaacggatcggccagaatggcccggaccgggttaccccgcggttcaaagccaatgactgttgttaggtccagtttctaaggacgaatcatccaatcactggttctttctgaacaaaacaaagagctatagagttacgttactgtagccgagacagagcctgcaatctggttatgccacatactaggttctttcttaaagttgactcactctatcctaagttctacttacaaggagctacaacaaattggtcataaccggagagcgttcaaggaggtaatatcccatcttactctgtagcaaggctacaaaaggagagctaaagaactaggctacaaaaagagagctaaagaactaactatctagcaagactacagagctatagtgtagagatttcataaccggtgagcgttcaaggatactttgaagagaagaggtaatatctcaactagcaagactacaaaaaaatggagatataaaactaactgtctaacaagactacagagctatagtagagatagatacgttcgacacttaagcatgagaattcgagctcggtaccctggttcacaaactcaatacaacacacagtggagtagggtattacgctccggcggcccgaaccactctaaatccttgtgtcctcgtgtgctcttccaccattaatgactgtaattgcagggacacgaagagttgtagcgcttttgccaacaagatccgctatatgctagtagagtggaacctgcacagcaacaagcatccaataatctgagaataagaattatgtgtggtgatggttctcatctctgcaactcgccattttcgcgagagaaccaaatccaagttggtgaagatcatgatttgggctcatgggctggcatagtagctattacctttgcaattgtggttcgaatctatccgatattctccttttcagggagagctaatgcttatgcttattgggtattttggtttgacactgcttcacgcccaaaaaaaggcaactatgtctgagttggatatggcccaaaaaaaggcagctatgtctgagttggatatggaagtcttctttcgtttagggtgaagtaagaccaagctcatgagcttattatcttaggtcggaacaaattagttgataggcatggcacatttatcaaattataatgattttaacagaaaagcaacacctctttttcagcagcaccagctttgcaagctgcaattgacactccaagcatagtatttgctccaaactcagcctgcatttcgcacaatatcatatctatttccatttggataaaatatattttccagaaatatgggaacagaatcaagatacagaaaaaagttgtggtagtagtggtaagtggaaacacaagtacagtgaaaagatagcattatttctgaacagtcaaattaaccgaaataagtagtatcacatactgcccctaaattgactacacccaatgtaaagaattgcttgagcatattgagccatcagttgtttgtttgtgtaacggatttgacaatgcagagttcaggagcaaaaaaccgcaaaggagagaaagagggaaaggatctcctagtatcccaccttgtggcgcgccctgtcaagtgcatgatggcctggtcgatctgcgtctgctgctgcggttccatcccaacgagtgcctccgacaccttgtcgttgatcacccgcaccgcgtaggcgacccccctggcgaggaacttccgcctctcggaggccccggccgcgtcggcggcggcgccctcgagcgcgcccacgctagccgtagatgctcggtgcacggccttgttggtgtgcaactcgacctcaacggccggtgcgctacgcccgtcaaggatctggcgcgcccgcaccctcgtgatcacggtgggcgcctcccgcctcatgtggccgacgatgaaaagcgccgggttaggggccttggcgcgcaccgccgtattcagggcctcctcgctcttgcgcgagagcaggtgcttccccaggtactcctgcactgacaaggctgccacagcggtggaatttgtcctcacgacttcgccacgtcgtcctcacctccctggcttcccacgactccgccgtatcgaggtgctcggtgggtcgtcttaatccgaagtccgaactaggaagacgagacagagaggtctgaggaatgggcctcgtttgatgttgagctgaattatttttccagcataagcccaggtcttggtccatgaacaaaattactagaaacccagcccagtactacgatctaaaagagggactgccactggatagctctctctagcattctccacgctccaatacagcggcgtcgtgtctatccgggtctatccgcgaacacgtgagaactctccagaaactgctttctcctccacttcatctctctcgctttccctctataaaaagaccccttctaggaattgagggagacagcaagcaccaagcagcgatccgaagctcaatcaattcactcaaacctcttccccaaatcttcgattagatcttcgttgacaagaagactagaaccgaacctgacatgtccaacctgctcacggttcaccagaaccttccggctcttccagtggacgcgacgtccgatgaagtcaggaagaacctcatggacatgttccgcgacaggcaagcgttcagcgagcacacctggaagatgctgctctccgtctgccgctcctgggctgcatggtgcaagctgaacaacaggaagtggttccccgctgagcccgaggacgtgagggattaccttctgtacctgcaagcgcgaggtttgtttctgcttctacctttgatatatatataataattatcattaattagtagtaatataatatttcaaatatttttttcaaaataaaagaatgtagtatatagcaattgcttttctgtagtttataagtgtgtatattttaatttataacttttctaatatatgaccaaaacatggtgatgcctaggtctggcagtgaagaccatccagcaacaccttggacaactgaacatgcttcacaggcgctccggcctcccgcgccccagcgactcgaacgccgtgagcctcgtcatgcgccgcatcaggaaggaaaacgtcgatgccggcgaaagggcaaagcaggccctcgcgttcgagaggaccgatttcgaccaggtccgcagcctgatggagaacagcgacaggtgccaggacattaggaacctggcgttcctcggaattgcatacaacacgctcctcaggatcgcggaaattgcccgcattcgcgtgaaggacattagccgcaccgacggcggcaggatgcttatccacattggcaggaccaagacgctcgtttccaccgcaggcgtcgaaaaggccctcagcctcggagtgaccaagctcgtcgaacgctggatctccgtgtccggcgtcgcggacgacccaaacaactacctcttctgccgcgtccgcaagaacggggtggctgcccctagcgccaccagccaactcagcacgagggccttggaaggtattttcgaggccacccaccgcctgatctacggcgcgaaggatgacagcggtcaacgctacctcgcatggtccgggcactccgcccgcgttggagctgctagggacatggcccgcgccggtgtttccatccccgaaatcatgcaggcgggtggatggacgaacgtgaacattgtcatgaactacattcgcaaccttgacagcgagacgggcgcaatggttcgcctcctggaagatggtgactgaggtacccaacctagacttgtccatcttctggattggccaacttaattaatgtatgaaataaaaggatgcacacatagtgacatgctaatcactataatgtgggcatcaaagttgtgtgttatgtgtaattactagttatctgaataaaagagaaagagatcatccatatttcttatcctaaatgaatgtcacgtgtctttataattctttgatgaaccagatgcatttcattaaccaaatccatatacatataaatattaatcatatataattaatatcaattgggttagcaaaacaaatctagtctaggtgtgttttgcgatccgatatcgaattggccacggtaccagctgctgctgttctagggttcacaagtctgcctatttgtcttccccaatggagctatggttgtctggtctggtccttggtcgtgtcccgtttcattgtgtactatttacctgtaatgtgtatccttaagtctggtttgatggtgtctgaaacgttttgctgtggtagagcagcatggaagaactataatgaataagtgatccctaatcattgtgtccaaattttgcttctgctatacccttttgtgctgtttcttatgttttgcttaaaaatttgatctgacaaacaaatttgtctaaattatgctcttgttctgactgtgtactgtacacatttgtattgctaccggtttggcacatagttttctctttgattgcagatcaaacccttctgattgcagattgcttggctatggctgatgtgctcactgttcttctttagcttgtatattgctgatggtggcttggctacggctgaaaaagttgctgctgcgccgacttggcaactgttgctccagtaatgctttgtcctctcttcctagccgccgacttggcacttggcagctgttgctcctgtaatgcgttgttatctcttatctcttgagatgtactatgattttgaggctgtttgacttgtgccagattgccagtgctgatgctatattatctcaggtttttatgctagtatatgttttactgtgtgctgcctgtgtcgagttacgtaatctattgaaccgctatgcgtgttgatgccctgttgttgcttgccagattgatgcccctgttgcttgcagcttgcaagctgtagtgaaatcctaaaattccaaaccaaatctattctgaacttttgaagatctgtgatgtccggaagaaaagattcaaacagataaacgggactctccagaatctataaaataaatgatcgacaaacgctttgctttggtaggcttcaagcttggtcacccggtccgggcctagaaggccagcttcggccgccccgggcaactttattatacaaagttgatagataaatcagatatctggttcctaaggacccggcggaccgattaaactgattcggtccgacgcgttacctaataacttcgtatagcatacattatacgaagttattagctaactaactagtaagcttaagccatgggtcgacggatccgttaactagcgtggcatttggcaccgccgcacactatgcgagctaggagtgctagtttacagatgaaactatgaaaccaagaaaacacaattgtccgtagctagcgcgtggcgtcgtgtcaagcttcacacagtatcttcgttcttcactataaatcgcgcctgttgttcgtgagacccaccaccgtggataacagtcccctaataataagcgatcaacagcactgctgatggctgaacaccgaggcgccgccgcgcgtaaccatccgccggagcagcccgtcgtgccggcgaacgacgccttccccgaccgcgcccagcagctctgcctcgacgccgggcgcgcgctcgcgatgtgcggcgtgctcgtcgccgtccctcccgcattttacgcgtcgacgtcgcggacgacaccgcacttgccttcgtcggcttcgtcctctggatcatcggtgcgtggctgtgcctcctggcgctcacgcccttggctccacgggcggtgagggcgggcggggccgccgccagcaccttgctgatcaggtgcctgtccctttcatgaactactagcgcccgcgcccgcggccgccgggcacaagagaacacatcgatgttcgctgcgtacgtcagcaataaggcactctttgtcagtagtcgagtgcatatgttgggtgtttgccctgggagatttcaagtgttgtggccattatcccgcaggataaaaaatcggcggcttttggattgatacggaaaataacgatgtttcatgctcgtgttgtgtgtgtgacatcttgtcagccaagtttttaaccgttgctactccccctctgtgggctcagtgtgtggaccggaatacgtcgtacataggccgtagcctaagcccaatatgccgtttttcaggttggcctgtgtgacgacaagcgggtctcaaaagcccatcacgcaactggcctgcaattattggaggagagcgcgtcgagttggttccagaggctgcgtggtggggccggactctgcgacgacctctcgttcgcgtccgatttggttgccgtgagccgtgacgtaacgcctccttccgttcctccctatataagttccacccccgggtccggtttccccaagccccagtgacccccgatcccgatcgcgaaatctccgcacccgccggcaagggaccgaagcaagcctctctcccgaccgtcgcatcaaggtacgcgtccgctcgatctgtcctcttccttctcgatttgacttgctgtggtgcccgatcacgggatcagaatcgcaccagtgtagatttcgcatgttctaagatgtgttagtttccaggctaatccagttctcttgacgcccgatccgatcgagctccgtgtttatttcagcctaatcgtagtattcccctaaaatttcctcattagggggttcgcaagattgttggtcgacaggttcacttatgctcgatcgcttacttttagtcgattcatgctgcgtactattgttgccccccgtggttttatcttttctcgtgtgaaatccagtagatatagtagatatcgtagcattaggttttaattcaatcgattgattattgtatcatcaaaattgagaagttcgaatcatgcctatcatgctgcctcaaccgaaatcctgtatattgaagtttcaattcaattgattgatcattcattagattcaaccaaaatctagaaggttagatgacgcatgtcatgctgcctgcgtagtttacctttgatctgtttatgattaccttatcagtaggatatttgtgattttgggaagtagcactaactgattcatgctgacatgatgttccctttcagattatactgttgagtcctatctaattgatgctttgtatgctatatgaatacgtcatggtaaattagcagttaattagcatattagcaattgggcgtacctcatcaggattgctcttgtagatgtgtgtggtgatgtttcttgttcaattcatgttctgctttaaaagtatgtgttctctgtttgttaattaagattcatggttataatgatttggacctaattaatcagggttgcccttttagatgcgtggttacttgttgagttcatttttttcctgctatagttgtatgcgtttgttcattcatggttagatttgatttgtttcttctctattccatgccttccatatacttcaattgtagcttaacatgagatttctgtatatgcaggtcgaccgccggggatccacacgacaccatggcccagtccaagcacggcctgaccaaggagatgaccatgaagtaccgcatggagggctgcgtggacggccacaagttcgtgatcaccggcgagggcatcggctaccccttcaagggcaagcaggccatcaacctgtgcgtggtggagggcggccccttgcccttcgccgaggacatcttgtccgccgccttcatgtacggcaaccgcgtgttcaccgagtacccccaggacatcgtcgactacttcaagaactcctgccccgccggctacacctgggaccgctccttcctgttcgaggacggcgccgtgtgcatctgcaacgccgacatcaccgtgagcgtggaggagaactgcatgtaccacgagtccaagttctacggcgtgaacttccccgccgacggccccgtgatgaagaagatgaccgacaactgggagccctcctgcgagaagatcatccccgtgcccaagcagggcatcttgaagggcgacgtgagcatgtacctgctgctgaaggacggtggccgcttgcgctgccagttcgacaccgtgtacaaggccaagtccgtgccccgcaagatgcccgactggcacttcatccagcacaagctgacccgcgaggaccgcagcgacgccaagaaccagaagtggcacctgaccgagcacgccatcgcctccggctccgccttgccctccggactcagatctcgatagagtcaacctagacttgtccatcttctggattggccaacttaattaatgtatgaaataaaaggatgcacacatagtgacatgctaatcactataatgtgggcatcaaagttgtgtgttatgtgtaattactagttatctgaataaaagagaaagagatcatccatatttcttatcctaaatgaatgtcacgtgtctttataattctttgatgaaccagatgcatttcattaaccaaatccatatacatataaatattaatcatatataattaatatcaattgggttagcaaaacaaatctagtctaggtgtgttttgcgaattgcggcgcccttactttaacgcctctaaccaacacccctttatctttataaggaacaataaacagaatttgccccactgttctaaatcacctaataatatccccagctaaaaacaataaaggtttcctagaattaagacaagcatgactgttcctccaggagggtttggaacattgttgcagtcttgcagatacgggcgaagggtgagaaacagagcggagggctggaggtgacctcggtagtcgacgccggagttgagcttgacaacgacggggcggcccctgatggacttgaggaagtccgatggcgtcttcaccgtcccgccggcgcccgaggcgggcctgtcgctgccgccgccgccgctgctcatcttgcgcgctgtgcccccggcggtgtccctgtgttgcggatcgcgggtgggccaggtggatgcgagggcgacccgtttggactccggccggagccgccggatccctggtcggtgtcagtgccgtttactctgggccccacgtgtcagtaccgtctgtagatgacaacaacccgtcgtccacagtcatgtccaaaatatcctttcttcttttttttcgattcggatatctatcttccttttttttttccaaaaatcttcttgacgcaccagcgcgcacgtttgtggtaaacgccgacacgtcggtcccacgtcgatagaccccacccaccagtgagtagcgtgtacgtattcgggggtgacggacgtgtcgccgtcgtcttgctagtcccattcccatctgagccacacatctctgaacaaaaaaaaggagggaggcctccacgcacatccccctccgtgccacccgccccaaaccctcgcgccgcctccgagacagccgccgcaaccatggccaccgccgccgccgcgtctaccgcgctcactggcgccactaccgctgcgcccaaggcgaggcgccgggcgcacctcctggccacccgccgcgccctcgccgcgcccatcaggtgctcagcggcgtcacccgccatgccgatggctcccccggccaccccgctccggccgtggggccccaccgagccccgcaagggtgctgacatcctcgtcgagtccctcgagcgctgcggcgtccgcgacgtcttcgcctaccccggcggcgcgtccatggagatccaccaggcactcacccgctcccccgtcatcgccaaccacctcttccgccacgagcaaggggaggcctttgccgcctccggctacgcgcgctcctcgggccgcgtcggcgtctgcatcgccacctccggccccggcgccaccaacctagtctccgcgctcgccgacgcgctgctcgattccgtccccatggtcgccatcacgggacaggtggcgcgacgcatgattggcaccgacgccttccaggagacgcccatcgtcgaggtcacccgctccatcaccaagcacaactacctggtcctcgacgtcgacgacatcccccgcgtcgtgcaggaggctttcttcctcgcctcctctggtcgaccagggccggtgcttgtcgacatccccaaggacatccagcagcagatggcggtgcctgtctgggacaagcccatgagtctgcctgggtacattgcgcgccttcccaagccccctgcgactgagttgcttgagcaggtgctgcgtcttgttggtgaatcgcggcgccctgttctttatgtgggcggtggctgcgcagcatctggtgaggagttgcgacgctttgtggagctgactggaatcccggtcacaactactcttatgggcctcggcaacttccccagcgacgacccactgtctctgcgcatgctaggtatgcatgggacggtgtatgcaaattatgcagtggataaggccgatctgttgcttgcacttggtgtgcggtttgatgatcgcgtgacagggaagattgaggcttttgcaagcagggctaagattgtgcacgttgatattgatccggctgagattggcaagaacaagcagccacatgtgtccatctgtgcagatgttaagcttgctttgcagggcatgaatgctcttcttgaaggaagcacatcaaagaagagctttgactttggctcatggaacgatgagttggatcagcagaagagggaattcccccttgggtataaaacatctaatgaggagatccagccacaatatgctattcaggttcttgatgagctgacgaaaggcgaggccatcatcggcacaggtgttgggcagcaccagatgtgggcggcacagtactacacttacaagcggccaaggcagtggttgtcttcagctggtcttggggctatgggatttggtttgccggctgctgctggtgcttctgtggcaaacccaggtgtcactgttgttgacatcgatggagatggtagctttctcatgaacgttcaggagctagctatgatccgaattgagaacctcccagtgaaggtctttgtgctaaacaaccagcacctggggatggtggtgcagttggaggacaggttctataaggccaacagagcgcacacatacttgggaaacccagagaatgaaagtgagatatatccagatttcgtgacgatcgccaaagggttcaacattccagcggtccgtgtgacaaagaagaacgaagtccgcgcagcgataaagaagatgctcgagactccagggccgtacctcttggatataatcgtcccacaccaggagcatgtgttgcctatgatccctagtggtggggctttcaaggatatgatcctggatggtgatggcaggactgtgtactgactagctagtcagttaacagatctgccagatcctcggtgtacaaataacccgtcttatcctatgagacgggccggcgtcagtgtgttctggaggaatttttatgtcagagcctttttctttgtgtgcttgatgtagatgccaagggaagcttattggctgttgaagcttgatgcaaaataaattatggaactctgttttttgtttatctaataataactagcaaatatgcttccattgcattgaaactaacagccttttgtgtttccaagttttattttgtgacaatgtcatctatttcaattagttgtggaatcggaaacttgcaggactaacttggaaactccaatccctcagcatcctggactttttcctggtgtaatccatgtagatattattttaatcatcattttagttctggaggtttttccatctccggttttgctcccctttcttcaaaaaaaaaaaaaaaatgccgtaggcgccgcaacgcccacctgttgttcaaactcatgggcacgagtggctcgaagattttatacaacaattgctgtagtttcaccgttgctggtgaagaagcatttttttaaaaaaatatagtggtattcattttaattagtttagttgtgcagcgagcaaaatttggacatgctctgctcggaatctgatcgacctagacacagattagcagcagtagctttgtcatctgttccaagagttgcgatctgatagaagaaaaaaaaaccttcccttcaatgtaaaaccgaaactaacaagaaagaagcacagtgccgtttaggcaagtatggagtacgtattaagcatgtagaaggccatgcatgaaccactaacaagaaagaagcgcagtgccattcaggcaagcataagcatgtagattggcatgcatgaacaactaacagtagatcgtctctggtctgattagaagttttttgggaagccaagaaatcatgtacaactggttccatctcaaattccgtggcaaaaagaggcctaagcaacatacctcgagtagatcacattcaagcttggtcacccggtccgtcaatattctgattccgatgacttcgtaggttcctagctcaagccgctcgtgtccaagcgtcacttacgattagctaatgattacggcatctaggaccgactagtggcgcgccgactagctagctaaggtaccgagctcgaattcattccgattaatcgtggcctcttgctcttcaggatgaagagctatgtttaaacgtgcaagcgctactagacaattcagtacattaaaaacgtccgcaatgtgttattaagttgtctaagcgtcaatttgtttacaccacaatatatcctgcca

SEQ ID NO: 282 - DNA, 24852 bp, synthetic construct
  misc_feature 1..24852: note = PHP99716
  source 1..24852: mol_type = other DNA
gtttacccgccaatatatcctgtcaaacactgatagtttaaactgaaggcgggaaacgacaatctgatcatgagcggagaattaagggagtcacgttatgacccccgccgatgacgcgggacaagccgttttacgtttggaactgacagaaccgcaacgttgaaggagccactcagcaagctggtacgattgtaatacgactcactatagggcgaattgagcgctgtttaaacgctcttcaactggaagagcggttacgctgtttaaacgctcttcaactggaagagcggttactaccggttcactagctagctgctaatcgagctagttaccctatgaggtgacatgaagcgctcacggttactatgacggttagcttcacgactgttggtggcagtagcgtacgacttagctatagttccggacttacccttaagcgatttaaatctgcggttaccgaattcgagctcggtacctagtacccttgtacttttggtttcacctgcatagagaaaacccacaagaatatgacagtctgatttgtcagtctcattctcaagcaacatttctctatccgttactttcatggtgaataacacaatccatcatcaatactttgtgttactcagaaactgaaagttattccgagtcttgcatatctttggacctactcgtttttctaccattattgctgattgttaagctctcgctacttgaatcggcattgttggagtgggaaggttcaaaaaattggagttatgactagttgtctctttctatgtacgatggagaaaatgaataaacaactgagaaaatggctcttgtttagttgatgatgctcttaagctttccactggttgccatatatgatttgggcatttcactttgatcttaatgggccttgtaaagcccaagactcatgattatctttagttgatgctcttaattaggtgtgggcaaataattcaaactgtatgtacccgaccaaaaccaaagcaaaaataatcgaaccaaaccgaaaatttaaaaataaccgaatgaaaactaaatcctataactgaaagaactgaaaccgaatcaaaatatttaatgtaaccaaaaatatccgaaatataattatattgtcaaaaatattaataatttctagattaaataattaaaaatacttaaaaatttatataaaatagtaaaaatactcgaaaataaccacaaatattcaaaaacaaccgaaatatcccaaaatattcaaagcaaaataaccgaatggataccaaattttaaaaccgaaaaaactggaacaaaaccaaaatcgaaccaaaatttcaaaaatcgaataaatactaaactttagaacaaaaaaaaacgataaccgaatgtatacgaaccaaagccgaattagataaccgaacgtccaggactactcttaatctttccgccacttatgatttgggctattactttgtttataatgagccttttcaagctcaagttcatgattgtccgtgagatgagaaactgacttgttggattcgaaaccctagctagtattggttaatacttaatacataaatgacctgcattgacatcatcatccaagaaaataaaaattgtatgcttgagatatttagttttcctagctaggttttctttattttagtaccgaatctttaggtgtgccacgttaatttagacccattttttcatacttaccaactgagtctagtttaatcatgactataatcgtataaaatgattcagtcgacgtcattgcgaacgtatataaaatcatccaaattgacgtcattccaaagaggtaagcatgcttatctaagagtccgagcatactaaacaagacgacattttatttgcactccaaatcaaattttgtattgcctaaagaaaaacaatcaaactcaagtttcttaaaattaatttcattcaaactaatcactttcaatatctcacatattattcatgccatttctatttgtctaaacatgatttaaaaaaaaaagtaaaatacaaagattactatgcaaaaactctataaaaaaaaattcaaatttcttatttatttgtgacatcaaattttcaaaataatttttttaattatcggttgatccggtcagtcgataaaaacataaactttcagcgaccgttaaaactttcctactaccgatttagagaaaatcttagcttgaaacgtaattgtaacctgccttcatgcaagtcgcaagatatgtcatcctaagttgtatatgttttctcaaaagatgtatttacttgagaaaatacgtttcaacgttgatggacaaccaattaagaatcaagcacctttcgtaatcaatttaggcttatcgtctaaggtatactgatttacgacagttgactagacttataaggaacaaaataatagaatagtttctaaacacttcacctaatcatagagactaagatggtaattcgtaaacgacaaagcctagtgacactgtccattgtaaaattccacatcatattagtattaaacatatacatgtagtttcctgaacacatgtagtatcaaacacacttcgtggcttcttcctcgaaacctgcggccgcgctatagttccggacttacccttaagataacttcgtatagcatacattatacgaagttatgggcccacgcgtgaagagcggttaccagagctggtcacctttgtccaccaagatggaactgtcttcggccagaatggccatctggattcagcaggcctagaaggccatttatcgctatcaactttgtatagaaaagttgggccgaattcgagctcggtacggccagaatggcccggaccgaagcttgccgggcggcccgaatgtacacctatagccatgtctagcgagccgacccgaggcacgacccatttaatagtgtttaggccaacccgtcataagtgtcgtgtggtgcttgggccgtacctcggcccgtagtgctggcccggcccgacacattattttttattttaaaaaaatcatatatacatatgtacaatttatatttaatattataaatatctgaacatgatgttgtactggttagatagctttgttcagtgtcttctacccttcttttagggtgtggattcaaactccacctcctacaggcccgacacgtttaattttgggtctggcctggcccaatattaaatttgggtcatgccgtgccgacccacgagttgacccctcggcccacggtccggcccatattcagctaaacgtgccgggctttaaacgggcggcccaaaaatagtaaaggcccgaaatacaaatttgggcccaaaaacaaaatcgagcctataatacataattgagcccagaatacagaatcgagcccgaaatacacaaaagcctaaaattggaaacatacaatcaaatataatcagcaaaccaacaaaagagaagacaaacaatttttgaccaaaacaaacttaatattattagagctgtgctcttgtggctgcgcttgtggcatatagtctccgtgccggataaccctgccctcacgacggcggcaggtatgaccagcagctgggttgctaggcacgagcgtaaggtggcggcggcgcatacgctggagctcgtgggaggaagggtggcacgggcgcagggcgcatgccacgcaggcggcgcacgcgctggaacctggagctcgtgggaggaagggcggcaggggcgcagggcgtaggccgcgcagccacgcagggcgcgtcgcacactctcgctgtctcgcgctggagcctagaactgggggcctaggaggctgggacggcggtcggacgggacacgggagtaagagcgactcggcattttaggttttttgagcaacagggcaagacaaagctaaatggaaatgggcctcgccttcgccttaggctcgtggacaacttatgcgctgccgctgcctgagctgagcctgactgcctgaggaccaccgactcgccaagtggtgcgctgccgctcggttcgggcctttacgtgccggttaacgggccatttcaggcctgcttaaacgggccgggctcgtgcccgcccgtgagcctcggcctcggcccaagcatggcccgatacatcagaccaggccgatccgacccaaaataattttatgtcgtatcgtgtttggatcgtgtttttttttcgtgcttcgtgtcagcctattaaacccggaccaaatgtacacctacagtgccgacttccttctcccgttctccgctcctccgatcgacgatggccatcgctcaagctcagctgggccgacacaatcacacaagggtcggtccacccacattcgtacgcgtgcttgttgtctctgtcagccatcaactctccagtgagctgcgagcctacaaggctgtgggcagtgccagcctcaacctcgacctcccccagtcccccaccgaccaccggcctcctttcccgcaggcacgggtgcacggcacgcggtttccactcgcttcgtccgcgttcggatcgccctcaggtcaaccaccactcctcccctctgctcctctcagcatctcgcgcttcagatctcgcccaccgatctggaactggaattccctcccgatctgtatgtatctcacgcacgcttgctcgcgttcttggctttgctcccacctctctctagcagagtaacagtctagcagagcaagccccgggggatctcgactctagaggatcgctcaggaaggccgctgagatagaggcatggcggccaatgcgggcggcggtggagcgggaggaggcagcggcagcggcagcgtggctgcgccggcggtgtgccgccccagcggctcgcggtggacgccgacgccggagcagatcaggatgctgaaggagctctactacggctgcggcatccggtcgcccagctcggagcagatccagcgcatcaccgccatgctgcggcagcacggcaagatcgagggcaagaacgtcttctactggttccagaaccacaaggcccgcgagcgccagaagcgccgcctcaccagcctcgacgtcaacgtgcccgccgccggcgcggccgacgccaccaccagccaactcggcgtcctctcgctgtcgtcgccgccgccttcaggcgcggcgcctccctcgcccaccctcggcttctacgccgccggcaatggcggcggatcggctgtgctgctggacacgagttccgactggggcagcagcggcgctgccatggccaccgagacatgcttcctgcaggactacatgggcgtgacggacacgggcagctcgtcgcagtggccacgcttctcgtcgtcggacacgataatggcggcggccgcggcgcgggcggcgacgacgcgggcgcccgagacgctccctctcttcccgacctgcggcgacgacggcggcagcggtagcagcagctacttgccgttctggggtgccgcgtccacaactgccggcgccacttcttccgttgcgatccagcagcaacaccagctgcaggagcagtacagcttttacagcaacagcaacagcacccagctggccggcaccggcaaccaagacgtatcggcaacagcagcagcagccgccgccctggagctgagcctcagctcatggtgctccccttaccctgctgcagggagtatgtgagagcaacgcgagctgccactgctcttcactgatgtctctggaatggaaggaggaggaagtgagcatagcgttggtgcgttgctgtcaagggcgaattcacatggttaacctagacttgtccatcttctggattggccaacttaattaatgtatgaaataaaaggatgcacacatagtgacatgctaatcactataatgtgggcatcaaagttgtgtgttatgtgtaattactagttatctgaataaaagagaaagagatcatccatatttcttatcctaaatgaatgtcacgtgtctttataattctttgatgaaccagatgcatttcattaaccaaatccatatacatataaatattaatcatatataattaatatcaattgggttagcaaaacaaatctagtctaggtgtgttttgcgaatgcggccgccaccgcggtggagctcgaattccggtccgggcctagaaggccagcttcaagtttgtacaaaaaagcaggctccggccagaatctcactgactagctaaacagcggccgcatcgagcagctggcttgtggggaccagacaaaaaaggaatggtgcagaattgttaggcgcacctaccaaaagcatctttgcctttattgcaaagataaagcagattcctctagtacaagtggggaacaaaataacgtggaaaagagctgtcctgacagcccactcactaatgcgtatgacgaacgcagtgacgaccacaaaactcgagcaacgagatcatgagccaatcaaagaggagtgatgtagacctaaagcaataatggagccatgacgtaagggcttacgcccatacgaaataattaaaggctgatgtgacctgtcggtctctcagaacctttactttttatgtttggcgtgtatttttaaatttccacggcaatgacgatgtgaccgtcgacccactaaaacattgctttgtcaaaagctaaaaaagatgatgcccgacagccacttgtgtgaagcatgagaagccggtccctccactaagaaaattagtgaagcatcttccagtggtccctccactcacagctcaatcagtgagcaacaggacgaaggaaatgacgtaagccatgacgtctaatcccagggcccggtgaccaatcgaattagcttggcgcgtggaccgaagcttgcatgcctgcagtgcagcgtgacccggtcgtgcccctctctagagataatgagcattgcatgtctaagttataaaaaattaccacatattttttttgtcacacttgtttgaagtgcagtttatctatctttatacatatatttaaactttactctacgaataatataatctatagtactacaataatatcagtgttttagagaatcatataaatgaacagttagacatggtctaaaggacaattgagtattttgacaacaggactctacagttttatctttttagtgtgcatgtgttctcctttttttttgcaaatagcttcacctatataatacttcatccattttattagtacatccatttagggtttagggttaatggtttttatagactaatttttttagtacatctattttattctattttagcctctaaattaagaaaactaaaactctattttagtttttttatttaataatttagatataaaatagaataaaataaagtgactaaaaattaaacaaataccctttaagaaattaaaaaaactaaggaaacatttttcttgtttcgagtagataatgccagcctgttaaacgccgtcgacgagtctaacggacaccaaccagcgaaccagcagcgtcgcgtcgggccaagcgaagcagacggcacggcatctctgtcgctgcctctggacccctctcgagagttccgctccaccgttggacttgctccgctgtcggcatccagaaattgcgtggcggagcggcagacgtgagccggcacggcaggcggcctcctcctcctctcacggcaccggcagctacgggggattcctttcccaccgctccttcgctttcccttcctcgcccgccgtaataaatagacaccccctccacaccctctttccccaacctcgtgttgttcggagcgcacacacacacaaccagatctcccccaaatccacccgtcggcacctccgcttcaaggtacgccgctcgtcctcccccccccccctctctaccttctctagatcggcgttccggtccatgcatggttagggcccggtagttctacttctgttcatgtttgtgttagatccgtgtttgtgttagatccgtgctgctagcgttcgtacacggatgcgacctgtacgtcagacacgttctgattgctaacttgccagtgtttctctttggggaatcctgggatggctctagccgttccgcagacgggatcgatttcatgattttttttgtttcgttgcatagggtttggtttgcccttttcctttatttcaatatatgccgtgcacttgtttgtcgggtcatcttttcatgcttttttttgtcttggttgtgatgatgtggtctggttgggcggtcgttctagatcggagtagaattctgtttcaaactacctggtggatttattaattttggatctgtatgtgtgtgccatacatattcatagttacgaattgaagatgatggatggaaatatcgatctaggataggtatacatgttgatgcgggttttactgatgcatatacagagatgctttttgttcgcttggttgtgatgatgtggtgtggttgggcggtcgttcattcgttctagatcggagtagaatactgtttcaaactacctggtgtatttattaattttggaactgtatgtgtgtgtcatacatcttcatagttacgagtttaagatggatggaaatatcgatctaggataggtatacatgttgatgtgggttttactgatgcatatacatgatggcatatgcagcatctattcatatgctctaaccttgagtacctatctattataataaacaagtatgttttataattattttgatcttgatatacttggatgatggcatatgcagcagctatatgtggatttttttagcactgccttcatacgctatttatttgcttggtactgtttcttttgtcgatgctcaccctgttgtttggtgttacttctgcaggtcgactttaacttagcctaggatccatggccactgtgaacaactggctcgctttctccctctccccgcaggagctgccgccctcccagacgacggactccacactcatctcggccgccaccgccgaccatgtctccggcgatgtctgcttcaacatcccccaagattggagcatgaggggatcagagctttcggcgctcgtcgcggagccgaagctggaggacttcctcggcggcatctccttctccgagcagcatcacaaggccaactgcaacatgatacccagcactagcagcacagtttgctacgcgagctcaggtgctagcaccggctaccatcaccagctgtaccaccagcccaccagctcagcgctccacttcgcggactccgtaatggtggcttcctcggccggtgtccacgacggcggtgccatgctcagcgcggccgccgctaacggtgtcgctggcgctgccagtgccaacggcggcggcatcgggctgtccatgattaagaactggctgcggagccaaccggcgcccatgcagccgagggtggcggcggctgagggcgcgcaggggctctctttgtccatgaacatggcggggacgacccaaggcgctgctggcatgccacttctcgctggagagcgcgcacgggcgcccgagagtgtatcgacgtcagcacagggtggagccgtcgtcgtcacggcgccgaaggaggatagcggtggcagcggtgttgccggcgctctagtagccgtgagcacggacacgggtggcagcggcggcgcgtcggctgacaacacggcaaggaagacggtggacacgttcgggcagcgcacgtcgatttaccgtggcgtgacaaggcatagatggactgggagatatgaggcacatctttgggataacagttgcagaagggaagggcaaactcgtaagggtcgtcaagtctatttaggtggctatgataaagaggagaaagctgctagggcttatgatcttgctgctctgaagtactggggtgccacaacaacaacaaattttccagtgagtaactacgaaaaggagctcgaggacatgaagcacatgacaaggcaggagtttgtagcgtctctgagaaggaagagcagtggtttctccagaggtgcatccatttacaggggagtgactaggcatcaccaacatggaagatggcaagcacggattggacgagttgcagggaacaaggatctttacttgggcaccttcagcacccaggaggaggcagcggaggcgtacgacatcgcggcgatcaagttccgcggcctcaacgccgtcaccaacttcgacatgagccgctacgacgtgaagagcatcctggacagcagcgccctccccatcggcagcgccgccaagcgcctcaaggaggccgaggccgcagcgtccgcgcagcaccaccacgccggcgtggtgagctacgacgtcggccgcatcgcctcgcagctcggcgacggcggagccctggcggcggcgtacggcgcgcactaccacggcgccgcctggccgaccatcgcgttccagccgggcgccgccagcacaggcctgtaccacccgtacgcgcagcagccaatgcgcggcggcgggtggtgcaagcaggagcaggaccacgcggtgatcgcggccgcgcacagcctgcaggacctccaccacctgaacctgggcgcggccggcgcgcacgactttttctcggcagggcagcaggccgccgccgctgcgatgcacggcctgggtagcatcgacagtgcgtcgctcgagcacagcaccggctccaactccgtcgtctacaacggcggggtcggcgacagcaacggcgccagcgccgtcggcggcagtggcggtggctacatgatgccgatgagcgctgccggagcaaccactacatcggcaatggtgagccacgagcaggtgcatgcacgggcctacgacgaagccaagcaggctgctcagatggggtacgagagctacctggtgaacgcggagaacaatggtggcggaaggatgtctgcatgggggactgtcgtgtctgcagccgcggcggcagcagcaagcagcaacgacaacatggccgccgacgtcgggcatggcggcgcgcagctcttcagtgtctggaacgacacttaagcgtacctagtggtacctgacatcttatagtctgcaacctctcgtgtctgaattcctatctttatcaagtgttattgcttccacgactataggacagctttcgtcgaaagcttttgctcatgtgatctcgaaggattcatctagtctgatttttcgtgacttgtatcggttttattggattcatccaacatatatcaataaaaaatgagttgtgtttcctttcttcctagttcagttaaaattatttccctcctgcgcttgtgctgtaattgtctgtgtacctgttgtttgtgactgtgttagttcccttggatatgatttcgtatttgatatgtacatggagatagcttagcttcattattggagtatgaagttagtatgacatagtcactctcctggaaaattgacactgcaaaccatatttttattctgaaccacaaatcctagtcagtccgctggcatatgccgtccgtttgctgaatccagaacgtgggtttggagatgtacggctgagatgcctctatgcgaaggggatttcgtggtgaaacgagatgggagtagagcaacgcccgtggaagatgcttcaaacttccacacttttgagcaacgatcggcagtagtaaggtagacgatttcaagatcaaagcatatgaagataaacaacatcaacaacaaaatttgttggggttctatagagagaaacagagctacatacatacactgttttgtatctaccatctgagatgatgaaaagatgaaaaactaaagaatgccccggcgccaacgccaggacacgccgcgcgcgcgtcacccgagccatctcttgacccagccggcgctgtatatttacacacgttgcagcatcgatcaccacctgttcgatcgcgtcgccgtcaccggcgcgccgcgacttattgaactagtctagggcgcggctaacaacctagcttagattgccttgtctaaacccttaggctaacgcgccactctagaaggccgatctcccccgaacgcgccagatccgatatcgatgggccctggccgaagcttggtcacccggtccgggcctagaaggccgatctcccgggcacccagctttcttgtacaaagtggccgttaacggatcggccagaatggcccggaccgggttaccccgcggttcaaagccaatgactgttgttaggtccagtttctaaggacgaatcatccaatcactggttctttctgaacaaaacaaagagctatagagttacgttactgtagccgagacagagcctgcaatctggttatgccacatactaggttctttcttaaagttgactcactctatcctaagttctacttacaaggagctacaacaaattggtcataaccggagagcgttcaaggaggtaatatcccatcttactctgtagcaaggctacaaaaggagagctaaagaactaggctacaaaaagagagctaaagaactaactatctagcaagactacagagctatagtgtagagatttcataaccggtgagcgttcaaggatactttgaagagaagaggtaatatctcaactagcaagactacaaaaaaatggagatataaaactaactgtctaacaagactacagagctatagtagagatagatacgttcgacacttaagcatgagaattcgagctcggtaccctggttcacaaactcaatacaacacacagtggagtagggtattacgctccggcggcccgaaccactctaaatccttgtgtcctcgtgtgctcttccaccattaatgactgtaattgcagggacacgaagagttgtagcgcttttgccaacaagatccgctatatgctagtagagtggaacctgcacagcaacaagcatccaataatctgagaataagaattatgtgtggtgatggttctcatctctgcaactcgccattttcgcgagagaaccaaatccaagttggtgaagatcatgatttgggctcatgggctggcatagtagctattacctttgcaattgtggttcgaatctatccgatattctccttttcagggagagctaatgcttatgcttattgggtattttggtttgacactgcttcacgcccaaaaaaaggcaactatgtctgagttggatatggcccaaaaaaaggcagctatgtctgagttggatatggaagtcttctttcgtttagggtgaagtaagaccaagctcatgagcttattatcttaggtcggaacaaattagttgataggcatggcacatttatcaaattataatgattttaacagaaaagcaacacctctttttcagcagcaccagctttgcaagctgcaattgacactccaagcatagtatttgctccaaactcagcctgcatttcgcacaatatcatatctatttccatttggataaaatatattttccagaaatatgggaacagaatcaagatacagaaaaaagttgtggtagtagtggtaagtggaaacacaagtacagtgaaaagatagcattatttctgaacagtcaaattaaccgaaataagtagtatcacatactgcccctaaattgactacacccaatgtaaagaattgcttgagcatattgagccatcagttgtttgtttgtgtaacggatttgacaatgcagagttcaggagcaaaaaaccgcaaaggagagaaagagggaaaggatctcctagtatcccaccttgtggcgcgccctgtcaagtgcatgatggcctggtcgatctgcgtctgctgctgcggttccatcccaacgagtgcctccgacaccttgtcgttgatcacccgcaccgcgtaggcgacccccctggcgaggaacttccgcctctcggaggccccggccgcgtcggcggcggcgccctcgagcgcgcccacgctagccgtagatgctcggtgcacggccttgttggtgtgcaactcgacctcaacggccggtgcgctacgcccgtcaaggatctggcgcgcccgcaccctcgtgatcacggtgggcgcctcccgcctcatgtggccgacgatgaaaagcgccgggttaggggccttggcgcgcaccgccgtattcagggcctcctcgctcttgcgcgagagcaggtgcttccccaggtactcctgcactgacaaggctgccacagcggtggaatttgtcctcacgacttcgccacgtcgtcctcacctccctggcttcccacgactccgccgtatcgaggtgctcggtgggtcgtcttaatccgaagtccgaactaggaagacgagacagagaggtctgaggaatgggcctcgtttgatgttgagctgaattatttttccagcataagcccaggtcttggtccatgaacaaaattactagaaacccagcccagtactacgatctaaaagagggactgccactggatagctctctctagcattctccacgctccaatacagcggcgtcgtgtctatccgggtctatccgcgaacacgtgagaactctccagaaactgctttctcctccacttcatctctctcgctttccctctataaaaagaccccttctaggaattgagggagacagcaagcaccaagcagcgatccgaagctcaatcaattcactcaaacctcttccccaaatcttcgattagatcttcgttgacaagaagactagaaccgaacctgacatgtccaacctgctcacggttcaccagaaccttccggctcttccagtggacgcgacgtccgatgaagtcaggaagaacctcatggacatgttccgcgacaggcaagcgttcagcgagcacacctggaagatgctgctctccgtctgccgctcctgggctgcatggtgcaagctgaacaacaggaagtggttccccgctgagcccgaggacgtgagggattaccttctgtacctgcaagcgcgaggtttgtttctgcttctacctttgatatatatataataattatcattaattagtagtaatataatatttcaaatatttttttcaaaataaaagaatgtagtatatagcaattgcttttctgtagtttataagtgtgtatattttaatttataacttttctaatatatgaccaaaacatggtgatgcctaggtctggcagtgaagaccatccagcaacaccttggacaactgaacatgcttcacaggcgctccggcctcccgcgccccagcgactcgaacgccgtgagcctcgtcatgcgccgcatcaggaaggaaaacgtcgatgccggcgaaagggcaaagcaggccctcgcgttcgagaggaccgatttcgaccaggtccgcagcctgatggagaacagcgacaggtgccaggacattaggaacctggcgttcctcggaattgcatacaacacgctcctcaggatcgcggaaattgcccgcattcgcgtgaaggacattagccgcaccgacggcggcaggatgcttatccacattggcaggaccaagacgctcgtttccaccgcaggcgtcgaaaaggccctcagcctcggagtgaccaagctcgtcgaacgctggatctccgtgtccggcgtcgcggacgacccaaacaactacctcttctgccgcgtccgcaagaacggggtggctgcccctagcgccaccagccaactcagcacgagggccttggaaggtattttcgaggccacccaccgcctgatctacggcgcgaaggatgacagcggtcaacgctacctcgcatggtccgggcactccgcccgcgttggagctgctagggacatggcccgcgccggtgtttccatccccgaaatcatgcaggcgggtggatggacgaacgtgaacattgtcatgaactacattcgcaaccttgacagcgagacgggcgcaatggttcgcctcctggaagatggtgactgaggtacccaacctagacttgtccatcttctggattggccaacttaattaatgtatgaaataaaaggatgcacacatagtgacatgctaatcactataatgtgggcatcaaagttgtgtgttatgtgtaattactagttatctgaataaaagagaaagagatcatccatatttcttatcctaaatgaatgtcacgtgtctttataattctttgatgaaccagatgcatttcattaaccaaatccatatacatataaatattaatcatatataattaatatcaattgggttagcaaaacaaatctagtctaggtgtgttttgcgatccgatatcgaattggccacggtaccagctgctgctgttctagggttcacaagtctgcctatttgtcttccccaatggagctatggttgtctggtctggtccttggtcgtgtcccgtttcattgtgtactatttacctgtaatgtgtatccttaagtctggtttgatggtgtctgaaacgttttgctgtggtagagcagcatggaagaactataatgaataagtgatccctaatcattgtgtccaaattttgcttctgctatacccttttgtgctgtttcttatgttttgcttaaaaatttgatctgacaaacaaatttgtctaaattatgctcttgttctgactgtgtactgtacacatttgtattgctaccggtttggcacatagttttctctttgattgcagatcaaacccttctgattgcagattgcttggctatggctgatgtgctcactgttcttctttagcttgtatattgctgatggtggcttggctacggctgaaaaagttgctgctgcgccgacttggcaactgttgctccagtaatgctttgtcctctcttcctagccgccgacttggcacttggcagctgttgctcctgtaatgcgttgttatctcttatctcttgagatgtactatgattttgaggctgtttgacttgtgccagattgccagtgctgatgctatattatctcaggtttttatgctagtatatgttttactgtgtgctgcctgtgtcgagttacgtaatctattgaaccgctatgcgtgttgatgccctgttgttgcttgccagattgatgcccctgttgcttgcagcttgcaagctgtagtgaaatcctaaaattccaaaccaaatctattctgaacttttgaagatctgtgatgtccggaagaaaagattcaaacagataaacgggactctccagaatctataaaataaatgatcgacaaacgctttgctttggtaggcttcaagcttggtcacccggtccgggcctagaaggccagcttcggccgccccgggcaactttattatacaaagttgatagataaatcagatatctggttcctaaggacccggcggaccgattaaactgattcggtccgacgcgttacctaataacttcgtatagcatacattatacgaagttattagctaactaactagtaagcttaagccatgggtcgacggatccgttaactagcgtggcatttggcaccgccgcacactatgcgagctaggagtgctagtttacagatgaaactatgaaaccaagaaaacacaattgtccgtagctagcgcgtggcgtcgtgtcaagcttcacacagtatcttcgttcttcactataaatcgcgcctgttgttcgtgagacccaccaccgtggataacagtcccctaataataagcgatcaacagcactgctgatggctgaacaccgaggcgccgccgcgcgtaaccatccgccggagcagcccgtcgtgccggcgaacgacgccttccccgaccgcgcccagcagctctgcctcgacgccgggcgcgcgctcgcgatgtgcggcgtgctcgtcgccgtccctcccgcattttacgcgtcgacgtcgcggacgacaccgcacttgccttcgtcggcttcgtcctctggatcatcggtgcgtggctgtgcctcctggcgctcacgcccttggctccacgggcggtgagggcgggcggggccgccgccagcaccttgctgatcaggtgcctgtccctttcatgaactactagcgcccgcgcccgcggccgccgggcacaagagaacacatcgatgttcgctgcgtacgtcagcaataaggcactctttgtcagtagtcgagtgcatatgttgggtgtttgccctgggagatttcaagtgttgtggccattatcccgcaggataaaaaatcggcggcttttggattgatacggaaaataacgatgtttcatgctcgtgttgtgtgtgtgacatcttgtcagccaagtttttaaccgttgctactccccctctgtgggctcagtgtgtggaccggaatacgtcgtacataggccgtagcctaagcccaatatgccgtttttcaggttggcctgtgtgacgacaagcgggtctcaaaagcccatcacgcaactggcctgcaattattggaggagagcgcgtcgagttggttccagaggctgcgtggtggggccggactctgcgacgacctctcgttcgcgtccgatttggttgccgtgagccgtgacgtaacgcctccttccgttcctccctatataagttccacccccgggtccggtttccccaagccccagtgacccccgatcccgatcgcgaaatctccgcacccgccggcaagggaccgaagcaagcctctctcccgaccgtcgcatcaaggtacgcgtccgctcgatctgtcctcttccttctcgatttgacttgctgtggtgcccgatcacgggatcagaatcgcaccagtgtagatttcgcatgttctaagatgtgttagtttccaggctaatccagttctcttgacgcccgatccgatcgagctccgtgtttatttcagcctaatcgtagtattcccctaaaatttcctcattagggggttcgcaagattgttggtcgacaggttcacttatgctcgatcgcttacttttagtcgattcatgctgcgtactattgttgccccccgtggttttatcttttctcgtgtgaaatccagtagatatagtagatatcgtagcattaggttttaattcaatcgattgattattgtatcatcaaaattgagaagttcgaatcatgcctatcatgctgcctcaaccgaaatcctgtatattgaagtttcaattcaattgattgatcattcattagattcaaccaaaatctagaaggttagatgacgcatgtcatgctgcctgcgtagtttacctttgatctgtttatgattaccttatcagtaggatatttgtgattttgggaagtagcactaactgattcatgctgacatgatgttccctttcagattatactgttgagtcctatctaattgatgctttgtatgctatatgaatacgtcatggtaaattagcagttaattagcatattagcaattgggcgtacctcatcaggattgctcttgtagatgtgtgtggtgatgtttcttgttcaattcatgttctgctttaaaagtatgtgttctctgtttgttaattaagattcatggttataatgatttggacctaattaatcagggttgcccttttagatgcgtggttacttgttgagttcatttttttcctgctatagttgtatgcgtttgttcattcatggttagatttgatttgtttcttctctattccatgccttccatatacttcaattgtagcttaacatgagatttctgtatatgcaggtcgaccgccggggatccacacgacaccatggcccagtccaagcacggcctgaccaaggagatgaccatgaagtaccgcatggagggctgcgtggacggccacaagttcgtgatcaccggcgagggcatcggctaccccttcaagggcaagcaggccatcaacctgtgcgtggtggagggcggccccttgcccttcgccgaggacatcttgtccgccgccttcatgtacggcaaccgcgtgttcaccgagtacccccaggacatcgtcgactacttcaagaactcctgccccgccggctacacctgggaccgctccttcctgttcgaggacggcgccgtgtgcatctgcaacgccgacatcaccgtgagcgtggaggagaactgcatgtaccacgagtccaagttctacggcgtgaacttccccgccgacggccccgtgatgaagaagatgaccgacaactgggagccctcctgcgagaagatcatccccgtgcccaagcagggcatcttgaagggcgacgtgagcatgtacctgctgctgaaggacggtggccgcttgcgctgccagttcgacaccgtgtacaaggccaagtccgtgccccgcaagatgcccgactggcacttcatccagcacaagctgacccgcgaggaccgcagcgacgccaagaaccagaagtggcacctgaccgagcacgccatcgcctccggctccgccttgccctccggactcagatctcgatagagtcaacctagacttgtccatcttctggattggccaacttaattaatgtatgaaataaaaggatgcacacatagtgacatgctaatcactataatgtgggcatcaaagttgtgtgttatgtgtaattactagttatctgaataaaagagaaagagatcatccatatttcttatcctaaatgaatgtcacgtgtctttataattctttgatgaaccagatgcatttcattaaccaaatccatatacatataaatattaatcatatataattaatatcaattgggttagcaaaacaaatctagtctaggtgtgttttgcgaattgcggcgcccttactttaacgcctctaaccaacacccctttatctttataaggaacaataaacagaatttgccccactgttctaaatcacctaataatatccccagctaaaaacaataaaggtttcctagaattaagacaagcatgactgttcctccaggagggtttggaacattgttgcagtcttgcagatacgggcgaagggtgagaaacagagcggagggctggaggtgacctcggtagtcgacgccggagttgagcttgacaacgacggggcggcccctgatggacttgaggaagtccgatggcgtcttcaccgtcccgccggcgcccgaggcgggcctgtcgctgccgccgccgccgctgctcatcttgcgcgctgtgcccccggcggtgtccctgtgttgcggatcgcgggtgggccaggtggatgcgagggcgacccgtttggactccggccggagccgccggatccctggtcggtgtcagtgccgtttactctgggccccacgtgtcagtaccgtctgtagatgacaacaacccgtcgtccacagtcatgtccaaaatatcctttcttcttttttttcgattcggatatctatcttccttttttttttccaaaaatcttcttgacgcaccagcgcgcacgtttgtggtaaacgccgacacgtcggtcccacgtcgatagaccccacccaccagtgagtagcgtgtacgtattcgggggtgacggacgtgtcgccgtcgtcttgctagtcccattcccatctgagccacacatctctgaacaaaaaaaaggagggaggcctccacgcacatccccctccgtgccacccgccccaaaccctcgcgccgcctccgagacagccgccgcaaccatggccaccgccgccgccgcgtctaccgcgctcactggcgccactaccgctgcgcccaaggcgaggcgccgggcgcacctcctggccacccgccgcgccctcgccgcgcccatcaggtgctcagcggcgtcacccgccatgccgatggctcccccggccaccccgctccggccgtggggccccaccgagccccgcaagggtgctgacatcctcgtcgagtccctcgagcgctgcggcgtccgcgacgtcttcgcctaccccggcggcgcgtccatggagatccaccaggcactcacccgctcccccgtcatcgccaaccacctcttccgccacgagcaaggggaggcctttgccgcctccggctacgcgcgctcctcgggccgcgtcggcgtctgcatcgccacctccggccccggcgccaccaacctagtctccgcgctcgccgacgcgctgctcgattccgtccccatggtcgccatcacgggacaggtggcgcgacgcatgattggcaccgacgccttccaggagacgcccatcgtcgaggtcacccgctccatcaccaagcacaactacctggtcctcgacgtcgacgacatcccccgcgtcgtgcaggaggctttcttcctcgcctcctctggtcgaccagggccggtgcttgtcgacatccccaaggacatccagcagcagatggcggtgcctgtctgggacaagcccatgagtctgcctgggtacattgcgcgccttcccaagccccctgcgactgagttgcttgagcaggtgctgcgtcttgttggtgaatcgcggcgccctgttctttatgtgggcggtggctgcgcagcatctggtgaggagttgcgacgctttgtggagctgactggaatcccggtcacaactactcttatgggcctcggcaacttccccagcgacgacccactgtctctgcgcatgctaggtatgcatgggacggtgtatgcaaattatgcagtggataaggccgatctgttgcttgcacttggtgtgcggtttgatgatcgcgtgacagggaagattgaggcttttgcaagcagggctaagattgtgcacgttgatattgatccggctgagattggcaagaacaagcagccacatgtgtccatctgtgcagatgttaagcttgctttgcagggcatgaatgctcttcttgaaggaagcacatcaaagaagagctttgactttggctcatggaacgatgagttggatcagcagaagagggaattcccccttgggtataaaacatctaatgaggagatccagccacaatatgctattcaggttcttgatgagctgacgaaaggcgaggccatcatcggcacaggtgttgggcagcaccagatgtgggcggcacagtactacacttacaagcggccaaggcagtggttgtcttcagctggtcttggggctatgggatttggtttgccggctgctgctggtgcttctgtggcaaacccaggtgtcactgttgttgacatcgatggagatggtagctttctcatgaacgttcaggagctagctatgatccgaattgagaacctcccagtgaaggtctttgtgctaaacaaccagcacctggggatggtggtgcagttggaggacaggttctataaggccaacagagcgcacacatacttgggaaacccagagaatgaaagtgagatatatccagatttcgtgacgatcgccaaagggttcaacattccagcggtccgtgtgacaaagaagaacgaagtccgcgcagcgataaagaagatgctcgagactccagggccgtacctcttggatataatcgtcccacaccaggagcatgtgttgcctatgatccctagtggtggggctttcaaggatatgatcctggatggtgatggcaggactgtgtactgactagctagtcagttaacagatctgccagatcctcggtgtacaaataacccgtcttatcctatgagacgggccggcgtcagtgtgttctggaggaatttttatgtcagagcctttttctttgtgtgcttgatgtagatgccaagggaagcttattggctgttgaagcttgatgcaaaataaattatggaactctgttttttgtttatctaataataactagcaaatatgcttccattgcattgaaactaacagccttttgtgtttccaagttttattttgtgacaatgtcatctatttcaattagttgtggaatcggaaacttgcaggactaacttggaaactccaatccctcagcatcctggactttttcctggtgtaatccatgtagatattattttaatcatcattttagttctggaggtttttccatctccggttttgctcccctttcttcaaaaaaaaaaaaaaaatgccgtaggcgccgcaacgcccacctgttgttcaaactcatgggcacgagtggctcgaagattttatacaacaattgctgtagtttcaccgttgctggtgaagaagcatttttttaaaaaaatatagtggtattcattttaattagtttagttgtgcagcgagcaaaatttggacatgctctgctcggaatctgatcgacctagacacagattagcagcagtagctttgtcatctgttccaagagttgcgatctgatagaagaaaaaaaaaccttcccttcaatgtaaaaccgaaactaacaagaaagaagcacagtgccgtttaggcaagtatggagtacgtattaagcatgtagaaggccatgcatgaaccactaacaagaaagaagcgcagtgccattcaggcaagcataagcatgtagattggcatgcatgaacaactaacagtagatcgtctctggtctgattagaagttttttgggaagccaagaaatcatgtacaactggttccatctcaaattccgtggcaaaaagaggcctaagcaacatacctcgagtagatcacattcaagcttggtcacccggtccgtcaatattctgattccgatgacttcgtaggttcctagctcaagccgctcgtgtccaagcgtcacttacgattagctaatgattacggcatctaggaccgactagtggcgcgccgactagctagctaaggtaccgagctcgaattcattccgattaatcgtggcctcttgctcttcaggatgaagagctatgtttaaacgtgcaagcgctactagacaattcagtacattaaaaacgtccgcaatgtgttattaagttgtctaagcgtcaatttgtttacaccacaatatatcctgcca

SEQ ID NO: 283 - DNA, 35927 bp, synthetic construct
  misc_feature 1..35927: note = PHP99721
  source 1..35927: mol_type = other DNA
gtttacccgccaatatatcctgtcaaacactgcggccgcacttgaccgcggatggagccggagctgtggtgaggccatcgacgggaggtgggggagaacacagtctcagtgttctttgtgagtccgcaaggtttttagcttttctgtattaattaaggttgctgttggctgtagaatacggtcgtggaagagctgtatcggtagctactacgtaagctattatatactggaagtctggagctcgtcgatctccggtcgtcttcctccatttctcctcgtcttgctttgactgctgctaccatttgcttctgttttctgatgaagcatgccatgtcggccaccagtgtttgtgtggtttttgcagggaatggctttcaagtgctgtgattgaatggccctcgtcgtcctcggctgagctcacatggacgcgtcatgtgagtgagatatatgatcatatgatgagtggggttcgggtgagtgcgtacttgaagtaggatcccgctttcactcattcattcattggcctttaaaccgggaaattttcgcgaggagatggagggaagcaagcagggtgacgagtgcagagtgccgcgagcgctttgtcaaaaggcaccgccgtaggcaaaaaaatcaatggccctgactgactcgatggtagtactactgtagagactagagagggttgctccccatatcttcgtgtgacttttactccagcattgcatttccgtcattgagacgttaattaatagcagctttcgggacagatgactgtggccatgtttcgtcacggccgcttcgtgccagctgggggtactatagtactgtgattttgttagtaaaaactttcattaggccaccattgacgaccgggccttcgcttttgctgcgctaattaaccatttcccggcgaccgaagggaacatgaacatgccccgacacatgagggcatgaggactagtgttctccctgtcgttcgttgacttgactagtgatagtttaaacgctcttcaactggaagagcggttactaccggttcactagctagctgctaatcgagctagttaccctatgaggtgacatgaagcgctcacggttactatgacggttagcttcacgactgttggtggcagtagcgtacgacttagctatagttccggacttacctagctaataacttcgtatagcatacattatacgaagttatggttaccgagctgttaccaagcggccgcacactgatagtttaaactgaaggcgggaaacgacaatctgatcatgagcggagaattaagggagtcacgttatgacccccgccgatgacgcgggacaagccgttttacgtttggaactgacagaaccgcaacgattgaaggagccactcagccgcgggtttctggagtttaatgagctaagcacatacgtcagaaaccattattgcgcgttcaaaagtcgcctaaggtcactatcagctagcaaatatttcttgtcaaaaatgctccactgacgttccataaattcccctcggtatccaattagagtctcatattcactcccatggcggccaatgcgggcggcggtggagcgggaggaggcagcggcagcggcagcgtggctgcgccggcggtgtgccgccccagcggctcgcggtggacgccgacgccggagcagatcaggatgctgaaggagctctactacggctgcggcatccggtcgcccagctcggagcagatccagcgcatcaccgccatgctgcggcagcacggcaagatcgagggcaagaacgtcttctactggttccagaaccacaaggcccgcgagcgccagaagcgccgcctcaccagcctcgacgtcaacgtgcccgccgccggcgcggccgacgccaccaccagccaactcggcgtcctctcgctgtcgtcgccgccgccttcaggcgcggcgcctccctcgcccaccctcggcttctacgccgccggcaatggcggcggatcggctgtgctgctggacacgagttccgactggggcagcagcggcgctgctatggccaccgagacatgcttcctgcaggactacatgggcgtgacggacacgggcagctcgtcgcagtggccacgcttctcgtcgtcggacacgataatggcggcggccgcggcgcgggcggcgacgacgcgggcgcccgagacgctccctctcttcccgacctgcggcgacgacggcggcagcggtagcagcagctacttgccgttctggggtgccgcgtccacaactgccggcgccacttcttccgttgcgatccaacagcaacaccagctgcaggagcagtacagcttttacagcaacagcaacagcacccagctggccggcaccggcaaccaagacgtatcggcaacagcagcagcagccgccgccctggagctgagcctcagctcatggtgctccccttaccctgctgcagggagtatgtgagagcaacgcgagctgccactgctcttcactgatgtctctggaatggaaggaggaggaagtgagaacagatcattcgacaaagcagcattagtccgttgatcggtggaagaccactcgtcagtgttgagttgaatgtttgatcaataaaatacggcaatgctgtaagggttgttttttatgccattgataatacactgtactgttcagttgttgaactctatttcttagccatgccaagtgcttttcttattttgaataacattacagcaaaaagttgaaagacaaaaaaaaaaacccccgaacagagtgctttgggtcccaagcttctttagactgtgttcggcgttccccctaaatttctccccctatatctcactcacttgtcacatcagcgttctctttccccctatatctccacgctctacagcagttccacctatatcaaacctctataccccaccacaacaatattatatactttcatcttcaactaactcatgtaccttccaatttttttctactaataattatttacgtgcacagaaacttagcaaggagagagagagcgggaatttaaatgctcggcgttaggcttttagtccgctaggtggctagaccgaggttaggacgctagttcactaggggcctagtggtgttttaagacgtcacggtcactacgaatcgaccgaagcttgcatgggccgcatcgagcagctggcttgtggggaccagacaaaaaaggaatggtgcagaattgttaggcgcacctaccaaaagcatctttgcctttattgcaaagataaagcagattcctctagtacaagtggggaacaaaataacgtggaaaagagctgtcctgacagcccactcactaatgcgtatgacgaacgcagtgacgaccacaaaactcgagcaacgagatcatgagccaatcaaagaggagtgatgtagacctaaagcaataatggagccatgacgtaagggcttacgcccatacgaaataattaaaggctgatgtgacctgtcggtctctcagaacctttactttttatgtttggcgtgtatttttaaatttccacggcaatgacgatgtgaccgtcgacccactaaaacattgctttgtcaaaagctaaaaaagatgatgcccgacagccacttgtgtgaagcatgagaagccggtccctccactaagaaaattagtgaagcatcttccagtggtccctccactcacagctcaatcagtgagcaacaggacgaaggaaatgacgtaagccatgacgtctaatcccagggccagcttgcatgcctgcagtgcagcgtgacccggtcgtgcccctctctagagataatgagcattgcatgtctaagttataaaaaattaccacatattttttttgtcacacttgtttgaagtgcagtttatctatctttatacatatatttaaactttactctacgaataatataatctatagtactacaataatatcagtgttttagagaatcatataaatgaacagttagacatggtctaaaggacaattgagtattttgacaacaggactctacagttttatctttttagtgtgcatgtgttctcctttttttttgcaaatagcttcacctatataatacttcatccattttattagtacatccatttagggtttagggttaatggtttttatagactaatttttttagtacatctattttattctattttagcctctaaattaagaaaactaaaactctattttagtttttttatttaataatttagatataaaatagaataaaataaagtgactaaaaattaaacaaataccctttaagaaattaaaaaaactaaggaaacatttttcttgtttcgagtagataatgccagcctgttaaacgccgtcgacgagtctaacggacaccaaccagcgaaccagcagcgtcgcgtcgggccaagcgaagcagacggcacggcatctctgtcgctgcctctggacccctctcgagagttccgctccaccgttggacttgctccgctgtcggcatccagaaattgcgtggcggagcggcagacgtgagccggcacggcaggcggcctcctcctcctctcacggcaccggcagctacgggggattcctttcccaccgctccttcgctttcccttcctcgcccgccgtaataaatagacaccccctccacaccctctttccccaacctcgtgttgttcggagcgcacacacacacaaccagatctcccccaaatccacccgtcggcacctccgcttcaaggtacgccgctcgtcctcccccccccccctctctaccttctctagatcggcgttccggtccatgcatggttagggcccggtagttctacttctgttcatgtttgtgttagatccgtgtttgtgttagatccgtgctgctagcgttcgtacacggatgcgacctgtacgtcagacacgttctgattgctaacttgccagtgtttctctttggggaatcctgggatggctctagccgttccgcagacgggatcgatttcatgattttttttgtttcgttgcatagggtttggtttgcccttttcctttatttcaatatatgccgtgcacttgtttgtcgggtcatcttttcatgcttttttttgtcttggttgtgatgatgtggtctggttgggcggtcgttctagatcggagtagaattctgtttcaaactacctggtggatttattaattttggatctgtatgtgtgtgccatacatattcatagttacgaattgaagatgatggatggaaatatcgatctaggataggtatacatgttgatgcgggttttactgatgcatatacagagatgctttttgttcgcttggttgtgatgatgtggtgtggttgggcggtcgttcattcgttctagatcggagtagaatactgtttcaaactacctggtgtatttattaattttggaactgtatgtgtgtgtcatacatcttcatagttacgagtttaagatggatggaaatatcgatctaggataggtatacatgttgatgtgggttttactgatgcatatacatgatggcatatgcagcatctattcatatgctctaaccttgagtacctatctattataataaacaagtatgttttataattattttgatcttgatatacttggatgatggcatatgcagcagctatatgtggatttttttagccctgccttcatacgctatttatttgcttggtactgtttcttttgtcgatgctcaccctgttgtttggtgttacttctgcaggtcgactttaacttagcctaggatccatggccactgtgaacaactggctcgctttctccctctccccgcaggagctgccgccctcccagacgacggactccacactcatctcggccgccaccgccgaccatgtctccggcgatgtctgcttcaacatcccccaagattggagcatgaggggatcagagctttcggcgctcgtcgcggagccgaagctggaggacttcctcggcggcatctccttctccgagcagcatcacaaggccaactgcaacatgatacccagcactagcagcacagtttgctacgcgagctcaggtgctagcaccggctaccatcaccagctgtaccaccagcccaccagctcagcgctccacttcgcggactccgtaatggtggcttcctcggccggtgtccacgacggcggtgccatgctcagcgcggccgccgctaacggtgtcgctggcgctgccagtgccaacggcggcggcatcgggctgtccatgattaagaactggctgcggagccaaccggcgcccatgcagccgagggtggcggcggctgagggcgcgcaggggctctctttgtccatgaacatggcggggacgacccaaggcgctgctggcatgccacttctcgctggagagcgcgcacgggcgcccgagagtgtatcgacgtcagcacagggtggagccgtcgtcgtcacggcgccgaaggaggatagcggtggcagcggtgttgccggcgctctagtagccgtgagcacggacacgggtggcagcggcggcgcgtcggctgacaacacggcaaggaagacggtggacacgttcgggcagcgcacgtcgatttaccgtggcgtgacaaggcatagatggactgggagatatgaggcacatctttgggataacagttgcagaagggaagggcaaactcgtaagggtcgtcaagtctatttaggtggctatgataaagaggagaaagctgctagggcttatgatcttgctgctctgaagtactggggtgccacaacaacaacaaattttccagtgagtaactacgaaaaggagctcgaggacatgaagcacatgacaaggcaggagtttgtagcgtctctgagaaggaagagcagtggtttctccagaggtgcatccatttacaggggagtgactaggcatcaccaacatggaagatggcaagcacggattggacgagttgcagggaacaaggatctttacttgggcaccttcagcacccaggaggaggcagcggaggcgtacgacatcgcggcgatcaagttccgcggcctcaacgccgtcaccaacttcgacatgagccgctacgacgtgaagagcatcctggacagcagcgccctccccatcggcagcgccgccaagcgcctcaaggaggccgaggccgcagcgtccgcgcagcaccaccacgccggcgtggtgagctacgacgtcggccgcatcgcctcgcagctcggcgacggcggagccctggcggcggcgtacggcgcgcactaccacggcgccgcctggccgaccatcgcgttccagccgggcgccgccagcacaggcctgtaccacccgtacgcgcagcagccaatgcgcggcggcgggtggtgcaagcaggagcaggaccacgcggtgatcgcggccgcgcacagcctgcaggacctccaccacctgaacctgggcgcggccggcgcgcacgactttttctcggcagggcagcaggccgccgccgctgcgatgcacggcctgggtagcatcgacagtgcgtcgctcgagcacagcaccggctccaactccgtcgtctacaacggcggggtcggcgacagcaacggcgccagcgccgtcggcggcagtggcggtggctacatgatgccgatgagcgctgccggagcaaccactacatcggcaatggtgagccacgagcaggtgcatgcacgggcctacgacgaagccaagcaggctgctcagatggggtacgagagctacctggtgaacgcggagaacaatggtggcggaaggatgtctgcatgggggactgtcgtgtctgcagccgcggcggcagcagcaagcagcaacgacaacatggccgccgacgtcgggcatggcggcgcgcagctcttcagtgtctggaacgacacttaagcgtacctagtggtacctgacatcttatagtctgcaacctctcgtgtctgaattcctatctttatcaagtgttattgcttccacgactataggacagctttcgtcgaaagcttttgctcatgtgatctcgaaggattcatctagtctgatttttcgtgacttgtatcggttttattggattcatccaacatatatcaataaaaaatgagttgtgtttcctttcttcctagttcagttaaaattatttccctcctgcgcttgtgctgtaattgtctgtgtacctgttgtttgtgactgtgttagttcccttggatatgatttcgtatttgatatgtacatggagatagcttagcttcattattggagtatgaagttagtatgacatagtcactctcctggaaaattgacactgcaaaccatatttttattctgaaccacaaatcctagtcagtccgctggcatatgccgtccgtttgctgaatccagaacgtgggtttggagatgtacggctgagatgcctctatgcgaaggggatttcgtggtgaaacgagatgggagtagagcaacgcccgtggaagatgcttcaaacttccacacttttgagcaacgatcggcagtagtaaggtagacgatttcaagatcaaagcatatgaagataaacaacatcaacaacaaaatttgttggggttctatagagagaaacagagctacatacatacactgttttgtatctaccatctgagatgatgaaaagatgaaaaactaaagaatgccccggcgccaacgccaggacacgccgcgcgcgcgtcacccgagccatctcttgacccagccggcgctgtatatttacacacgttgcagcatcgatcaccacctgttcgatcgcgtcgccgtcaccggcgcgccgcgacttattgaactagtctagggcgcggctaacaacctagcttagattgccttgtctaaacccttaggctaacgcgccacccgcggttcaaagccaatgactgttgttaggtccagtttctaaggacgaatcatccaatcactggttctttctgaacaaaacaaagagctatagagttacgttactgtagccgagacagagcctgcaatctggttatgccacatactaggttctttcttaaagttgactcactctatcctaagttctacttacaaggagctacaacaaattggtcataaccggagagcgttcaaggaggtaatatcccatcttactctgtagcaaggctacaaaaggagagctaaagaactaggctacaaaaagagagctaaagaactaactatctagcaagactacagagctatagtgtagagatttcataaccggtgagcgttcaaggatactttgaagagaagaggtaatatctcaactagcaagactacaaaaaaatggagatataaaactaactgtctaacaagactacagagctatagtagagatagatacgttcgacacttaagcatgagaattcgagctcggtaccctggttcacaaactcaatacaacacacagtggagtagggtattacgctccggcggcccgaaccactctaaatccttgtgtcctcgtgtgctcttccaccattaatgactgtaattgcagggacacgaagagttgtagcgcttttgccaacaagatccgctatatgctagtagagtggaacctgcacagcaacaagcatccaataatctgagaataagaattatgtgtggtgatggttctcatctctgcaactcgccattttcgcgagagaaccaaatccaagttggtgaagatcatgatttgggctcatgggctggcatagtagctattacctttgcaattgtggttcgaatctatccgatattctccttttcagggagagctaatgcttatgcttattgggtattttggtttgacactgcttcacgcccaaaaaaaggcaactatgtctgagttggatatggcccaaaaaaaggcagctatgtctgagttggatatggaagtcttctttcgtttagggtgaagtaagaccaagctcatgagcttattatcttaggtcggaacaaattagttgataggcatggcacatttatcaaattataatgattttaacagaaaagcaacacctctttttcagcagcaccagctttgcaagctgcaattgacactccaagcatagtatttgctccaaactcagcctgcatttcgcacaatatcatatctatttccatttggataaaatatattttccagaaatatgggaacagaatcaagatacagaaaaaagttgtggtagtagtggtaagtggaaacacaagtacagtgaaaagatagcattatttctgaacagtcaaattaaccgaaataagtagtatcacatactgcccctaaattgactacacccaatgtaaagaattgcttgagcatattgagccatcagttgtttgtttgtgtaacggatttgacaatgcagagttcaggagcaaaaaaccgcaaaggagagaaagagggaaaggatctcctagtatcccaccttgtggcgcgccctgtcaagtgcatgatggcctggtcgatctgcgtctgctgctgcggttccatcccaacgagtgcctccgacaccttgtcgttgatcacccgcaccgcgtaggcgacccccctggcgaggaacttccgcctctcggaggccccggccgcgtcggcggcggcgccctcgagcgcgcccacgctagccgtagatgctcggtgcacggccttgttggtgtgcaactcgacctcaacggccggtgcgctacgcccgtcaaggatctggcgcgcccgcaccctcgtgatcacggtgggcgcctcccgcctcatgtggccgacgatgaaaagcgccgggttaggggccttggcgcgcaccgccgtattcagggcctcctcgctcttgcgcgagagcaggtgcttccccaggtactcctgcactgacaaggctgccacagcggtggaatttgtcctcacgacttcgccacgtcgtcctcacctccctggcttcccacgactccgccgtatcgaggtgctcggtgggtcgtcttaatccgaagtccgaactaggaagacgagacagagaggtctgaggaatgggcctcgtttgatgttgagctgaattatttttccagcataagcccaggtcttggtccatgaacaaaattactagaaacccagcccagtactacgatctaaaagagggactgccactggatagctctctctagcattctccacgctccaatacagcggcgtcgtgtctatccgggtctatccgcgaacacgtgagaactctccagaaactgctttctcctccacttcatctctctcgctttccctctataaaaagaccccttctaggaattgagggagacagcaagcaccaagcagcgatccgaagctcaatcaattcactcaaacctcttccccaaatcttcgattagatcttcgttgacaagaagactagaaccgaacctgacatgtccaacctgctcacggttcaccagaaccttccggctcttccagtggacgcgacgtccgatgaagtcaggaagaacctcatggacatgttccgcgacaggcaagcgttcagcgagcacacctggaagatgctgctctccgtctgccgctcctgggctgcatggtgcaagctgaacaacaggaagtggttccccgctgagcccgaggacgtgagggattaccttctgtacctgcaagcgcgaggtttgtttctgcttctacctttgatatatatataataattatcattaattagtagtaatataatatttcaaatatttttttcaaaataaaagaatgtagtatatagcaattgcttttctgtagtttataagtgtgtatattttaatttataacttttctaatatatgaccaaaacatggtgatgcctaggtctggcagtgaagaccatccagcaacaccttggacaactgaacatgcttcacaggcgctccggcctcccgcgccccagcgactcgaacgccgtgagcctcgtcatgcgccgcatcaggaaggaaaacgtcgatgccggcgaaagggcaaagcaggccctcgcgttcgagaggaccgatttcgaccaggtccgcagcctgatggagaacagcgacaggtgccaggacattaggaacctggcgttcctcggaattgcatacaacacgctcctcaggatcgcggaaattgcccgcattcgcgtgaaggacattagccgcaccgacggcggcaggatgcttatccacattggcaggaccaagacgctcgtttccaccgcaggcgtcgaaaaggccctcagcctcggagtgaccaagctcgtcgaacgctggatctccgtgtccggcgtcgcggacgacccaaacaactacctcttctgccgcgtccgcaagaacggggtggctgcccctagcgccaccagccaactcagcacgagggccttggaaggtattttcgaggccacccaccgcctgatctacggcgcgaaggatgacagcggtcaacgctacctcgcatggtccgggcactccgcccgcgttggagctgctagggacatggcccgcgccggtgtttccatccccgaaatcatgcaggcgggtggatggacgaacgtgaacattgtcatgaactacattcgcaaccttgacagcgagacgggcgcaatggttcgcctcctggaagatggtgactgaggtacccaacctagacttgtccatcttctggattggccaacttaattaatgtatgaaataaaaggatgcacacatagtgacatgctaatcactataatgtgggcatcaaagttgtgtgttatgtgtaattactagttatctgaataaaagagaaagagatcatccatatttcttatcctaaatgaatgtcacgtgtctttataattctttgatgaaccagatgcatttcattaaccaaatccatatacatataaatattaatcatatataattaatatcaattgggttagcaaaacaaatctagtctaggtgtgttttgcgatccgatatcgaattggccacggtaccagctgctgctgttctagggttcacaagtctgcctatttgtcttccccaatggagctatggttgtctggtctggtccttggtcgtgtcccgtttcattgtgtactatttacctgtaatgtgtatccttaagtctggtttgatggtgtctgaaacgttttgctgtggtagagcagcatggaagaactataatgaataagtgatccctaatcattgtgtccaaattttgcttctgctatacccttttgtgctgtttcttatgttttgcttaaaaatttgatctgacaaacaaatttgtctaaattatgctcttgttctgactgtgtactgtacacatttgtattgctaccggtttggcacatagttttctctttgattgcagatcaaacccttctgattgcagattgcttggctatggctgatgtgctcactgttcttctttagcttgtatattgctgatggtggcttggctacggctgaaaaagttgctgctgcgccgacttggcaactgttgctccagtaatgctttgtcctctcttcctagccgccgacttggcacttggcagctgttgctcctgtaatgcgttgttatctcttatctcttgagatgtactatgattttgaggctgtttgacttgtgccagattgccagtgctgatgctatattatctcaggtttttatgctagtatatgttttactgtgtgctgcctgtgtcgagttacgtaatctattgaaccgctatgcgtgttgatgccctgttgttgcttgccagattgatgcccctgttgcttgcagcttgcaagctgtagtgaaatcctaaaattccaaaccaaatctattctgaacttttgaagatctgtgatgtccggaagaaaagattcaaacagataaacgggactctccagaatctataaaataaatgatcgacaaacgctttgctttggtaggcttcaagcttataacttcgtatagcatacattatacgaagttatgggcccacgcgtgaagagcggttaccagagctggtcacctttgtccaccaagatggaactgtcttcggccagaatggccatctggattcagcaggcctagaaggccatttatcgctatcaactttgtatagaaaagttgggccgaattcgagctcggtacggccagaatggcccggaccgacctgcagtgcagcgtgacccggtcgtgcccctctctagagataatgagcattgcatgtctaagttataaaaaattaccacatattttttttgtcacacttgtttgaagtgcagtttatctatctttatacatatatttaaactttactctacgaataatataatctatagtactacaataatatcagtgttttagagaatcatataaatgaacagttagacatggtctaaaggacaattgagtattttgacaacaggactctacagttttatctttttagtgtgcatgtgttctcctttttttttgcaaatagcttcacctatataatacttcatccattttattagtacatccatttagggtttagggttaatggtttttatagactaatttttttagtacatctattttattctattttagcctctaaattaagaaaactaaaactctattttagtttttttatttaataatttagatataaaatagaataaaataaagtgactaaaaattaaacaaataccctttaagaaattaaaaaaactaaggaaacatttttcttgtttcgagtagataatgccagcctgttaaacgccgtcgacgagtctaacggacaccaaccagcgaaccagcagcgtcgcgtcgggccaagcgaagcagacggcacggcatctctgtcgctgcctctggacccctctcgagagttccgctccaccgttggacttgctccgctgtcggcatccagaaattgcgtggcggagcggcagacgtgagccggcacggcaggcggcctcctcctcctctcacggcaccggcagctacgggggattcctttcccaccgctccttcgctttcccttcctcgcccgccgtaataaatagacaccccctccacaccctctttccccaacctcgtgttgttcggagcgcacacacacacaaccagatctcccccaaatccacccgtcggcacctccgcttcaaggtacgccgctcgtcctcccccccccccctctctaccttctctagatcggcgttccggtccatgcatggttagggcccggtagttctacttctgttcatgtttgtgttagatccgtgtttgtgttagatccgtgctgctagcgttcgtacacggatgcgacctgtacgtcagacacgttctgattgctaacttgccagtgtttctctttggggaatcctgggatggctctagccgttccgcagacgggatcgatttcatgattttttttgtttcgttgcatagggtttggtttgcccttttcctttatttcaatatatgccgtgcacttgtttgtcgggtcatcttttcatgcttttttttgtcttggttgtgatgatgtggtctggttgggcggtcgttctagatcggagtagaattctgtttcaaactacctggtggatttattaattttggatctgtatgtgtgtgccatacatattcatagttacgaattgaagatgatggatggaaatatcgatctaggataggtatacatgttgatgcgggttttactgatgcatatacagagatgctttttgttcgcttggttgtgatgatgtggtgtggttgggcggtcgttcattcgttctagatcggagtagaatactgtttcaaactacctggtgtatttattaattttggaactgtatgtgtgtgtcatacatcttcatagttacgagtttaagatggatggaaatatcgatctaggataggtatacatgttgatgtgggttttactgatgcatatacatgatggcatatgcagcatctattcatatgctctaaccttgagtacctatctattataataaacaagtatgttttataattattttgatcttgatatacttggatgatggcatatgcagcagctatatgtggatttttttagccctgccttcatacgctatttatttgcttggtactgtttcttttgtcgatgctcaccctgttgtttggtgttacttctgcaggtcgactctagaggatccaccggtcgccaccatggcaccgaagaagaagcgcaaggtgatggacaagaagtacagcatcggcctcgacatcggcaccaactcggtgggctgggccgtcatcacggacgaatataaggtcccgtcgaagaagttcaaggtcctcggcaatacagaccgccacagcatcaagaaaaacttgatcggcgccctcctgttcgatagcggcgagaccgcggaggcgaccaggctcaagaggaccgccaggagacggtacactaggcgcaagaacaggatctgctacctgcaggagatcttcagcaacgagatggcgaaggtggacgactccttcttccaccgcctggaggaatcattcctggtggaggaggacaagaagcatgagcggcacccaatcttcggcaacatcgtcgacgaggtaagtttctgcttctacctttgatatatatataataattatcattaattagtagtaatataatatttcaaatatttttttcaaaataaaagaatgtagtatatagcaattgcttttctgtagtttataagtgtgtatattttaatttataacttttctaatatatgaccaaaacatggtgatgtgcaggtggcctaccacgagaagtacccgacaatctaccacctccggaagaaactggtggacagcacagacaaggcggacctccggctcatctaccttgccctcgcgcatatgatcaagttccgcggccacttcctcatcgagggcgacctgaacccggacaactccgacgtggacaagctgttcatccagctcgtgcagacgtacaatcaactgttcgaggagaaccccataaacgctagcggcgtggacgccaaggccatcctctcggccaggctctcgaaatcaagaaggctggagaaccttatcgcgcagttgccaggcgaaaagaagaacggcctcttcggcaaccttattgcgctcagcctcggcctgacgccgaacttcaaatcaaacttcgacctcgcggaggacgccaagctccagctctcaaaggacacctacgacgacgacctcgacaacctcctggcccagataggagaccagtacgcggacctcttcctcgccgccaagaacctctccgacgctatcctgctcagcgacatccttcgggtcaacaccgaaattaccaaggcaccgctgtccgccagcatgattaaacgctacgacgagcaccatcaggacctcacgctgctcaaggcactcgtccgccagcagctccccgagaagtacaaggagatcttcttcgaccaatcaaaaaacggctacgcgggatatatcgacggcggtgccagccaggaagagttctacaagttcatcaaaccaatcctggagaagatggacggcaccgaggagttgctggtcaagctcaacagggaggacctcctcaggaagcagaggaccttcgacaacggctccatcccgcatcagatccacctgggcgaactgcatgccatcctgcggcgccaggaggacttctacccgttcctgaaggataaccgggagaagatcgagaagatcttgacgttccgcatcccatactacgtgggcccgctggctcgcggcaactcccggttcgcctggatgacccggaagtcggaggagaccatcacaccctggaactttgaggaggtggtcgataagggcgctagcgctcagagcttcatcgagcgcatgaccaacttcgataaaaacctgcccaatgaaaaagtcctccccaagcactcgctgctctacgagtacttcaccgtgtacaacgagctcaccaaggtcaaatacgtcaccgagggcatgcggaagccggcgttcctgagcggcgagcagaagaaggcgatagtggacctcctcttcaagaccaacaggaaggtgaccgtgaagcaattaaaagaggactacttcaagaaaatagagtgcttcgactccgtggagatctcgggcgtggaggatcggttcaacgcctcactcggcacgtatcacgacctcctcaagatcattaaagacaaggacttcctcgacaacgaggagaacgaggacatcctcgaggacatcgtcctcaccctgaccctgttcgaggaccgcgaaatgatcgaggagaggctgaagacctacgcgcacctgttcgacgacaaggtcatgaaacagctcaagaggcgccgctacactggttggggaaggctgtcccgcaagctcattaatggcatcagggacaagcagagcggcaagaccatcctggacttcctcaagtccgacgggttcgccaaccgcaacttcatgcagctcattcacgacgactcgctcacgttcaaggaagacatccagaaggcacaggtgagcgggcagggtgactccctccacgaacacatcgccaacctggccggctcgccggccattaaaaagggcatcctgcagacggtcaaggtcgtcgacgagctcgtgaaggtgatgggccggcacaagcccgaaaatatcgtcatagagatggccagggagaaccagaccacccaaaaagggcagaagaactcgcgcgagcggatgaaacggatcgaggagggcattaaagagctcgggtcccagatcctgaaggagcaccccgtggaaaatacccagctccagaatgaaaagctctacctctactacctgcagaacggccgcgacatgtacgtggaccaggagctggacattaatcggctatcggactacgacgtcgaccacatcgtgccgcagtcgttcctcaaggacgatagcatcgacaacaaggtgctcacccggtcggataaaaatcggggcaagagcgacaacgtgcccagcgaggaggtcgtgaagaagatgaaaaactactggcgccagctcctcaacgcgaaactgatcacccagcgcaagttcgacaacctgacgaaggcggaacgcggtggcttgagcgaactcgataaggcgggcttcataaaaaggcagctggtcgagacgcgccagatcacgaagcatgtcgcccagatcctggacagccgcatgaatactaagtacgatgaaaacgacaagctgatccgggaggtgaaggtgatcacgctgaagtccaagctcgtgtcggacttccgcaaggacttccagttctacaaggtccgcgagatcaacaactaccaccacgcccacgacgcctacctgaatgcggtggtcgggaccgccctgatcaagaagtacccgaagctggagtcggagttcgtgtacggcgactacaaggtctacgacgtgcgcaaaatgatcgccaagtccgagcaggagatcggcaaggccacggcaaaatacttcttctactcgaacatcatgaacttcttcaagaccgagatcaccctcgcgaacggcgagatccgcaagcgcccgctcatcgaaaccaacggcgagacgggcgagatcgtctgggataagggccgggatttcgcgacggtccgcaaggtgctctccatgccgcaagtcaatatcgtgaaaaagacggaggtccagacgggcgggttcagcaaggagtccatcctcccgaagcgcaactccgacaagctcatcgcgaggaagaaggattgggacccgaaaaaatatggcggcttcgacagcccgaccgtcgcatacagcgtcctcgtcgtggcgaaggtggagaagggcaagtcaaagaagctcaagtccgtgaaggagctgctcgggatcacgattatggagcggtcctccttcgagaagaacccgatcgacttcctagaggccaagggatataaggaggtcaagaaggacctgattattaaactgccgaagtactcgctcttcgagctggaaaacggccgcaagaggatgctcgcctccgcaggcgagttgcagaagggcaacgagctcgccctcccgagcaaatacgtcaatttcctgtacctcgctagccactatgaaaagctcaagggcagcccggaggacaacgagcagaagcagctcttcgtggagcagcacaagcattacctggacgagatcatcgagcagatcagcgagttctcgaagcgggtgatcctcgccgacgcgaacctggacaaggtgctgtcggcatataacaagcaccgcgacaaaccaatacgcgagcaggccgaaaatatcatccacctcttcaccctcaccaacctcggcgctccggcagccttcaagtacttcgacaccacgattgaccggaagcggtacacgagcacgaaggaggtgctcgatgcgacgctgatccaccagagcatcacagggctctatgaaacacgcatcgacctgagccagctgggcggagacaagagaccacgggaccgccacgatggcgagctgggaggccgcaagcgggcaaggtaggtaccgtcatgggtcgtttaagctgccgatgtgcctgcgtcgtctggtgccctctctccatatggaggttgtcaaagtatctgctgttcgtgtcatgagtcgtgtcagtgttggtttaataatggaccggttgtgttgtgtgtgcgtactacccagaactatgacaaatcatgaataagtttgatgtttgaaattaaagcctgtgctcattatgttctgtctttcagttgtctcctaatatttgcctgcaggtactggctatctaccgtttcttacttaggaggtgtttgaatgcactaaaactaatagttagtggctaaaattagttaaaacatccaaacaccatagctaatagttgaactattagctatttttggaaaattagttaatagtgaggtagttatttgttagctagctaattcaactaacaatttttagccaactaacaattagtttcagtgcattcaaacacccccttaatgttaacgtggttctatctaccgtctcctaatatatggttgattgttcggtttgttgctatgctattgggttctgattgctgctagttcttgctgaatccagaagttctcgtagtatagctcagattcatattatttatttgagtgataagtgatccaggttattactatgttagctaggttttttttacaaggataaattatctgtgatcataattcttatgaaagctttatgtttcctggaggcagtggcatgcaatgcatgacagcaacttgatcacaccagctgaggtagatacggtaacaaggttcttaaatctgttcaccaaatcattggagaacacacatacacattcttgccagtcttggttagagaaatttcatgacaaaatgccaaagctgtcttgactcttcacttttggccatgagtcgtgacttaacggcaaacgctaattagtcactaggcccaggaaacactaactaagccctagcttatcctagcgcaacctagttaggtcttccccaagtttgtacaaaaaagcaggctggatcggccagaatggccccggaccggagctttgagagtacaatgatgaacctagattaatcaatgccaaagtctgaaaaatgcaccctcagtctatgatccagaaaatcaagattgcttgaggccctgttcggttgttccggattagagccccggattaattcctagccggattacttctctaatttatatagattttgatgagctggaatgaatcctggcttattccggtacaaccgaacaggccctgaaggataccagtaatcgctgagctaaattggcatgctgtcagagtgtcagtattgcagcaaggtagtgagataaccggcatcatggtgccagtttgatggcaccattagggttagagatggtggccatgggcgcatgtcctggccaactttgtatgatatatggcagggtgaataggaaagtaaaattgtattgtaaaaagggatttcttctgtttgttagcgcatgtacaaggaatgcaagttttgagcgagggggcatcaaagatctggctgtgtttccagctgtttttgttagccccatcgaatccttgacataatgatcccgcttaaataagcaacctcgcttgtatagttccttgtgctctaacacacgatgatgataagtcgtaaaatagtggtgtccaaagaatttccaggcccagttgtaaaagctaaaatgctattcgaatttctactagcagtaagtcgtgtttagaaattatttttttatataccttttttccttctatgtacagtaggacacagtgtcagcgccgcgttgacggagaatatttgcaaaaaagtaaaagagaaagtcatagcggcgtatgtgccaaaaacttcgtcacagagagggccataagaaacatggcccacggcccaatacgaagcaccgcgacgaagcccaaacagcagtccgtaggtggagcaaagcgctgggtaatacgcaaacgttttgtcccaccttgactaatcacaagagtggagcgtaccttataaaccgagccgcaagcaccgaattgcataatgaggatcgaggatggttttagagctagaaatagcaagttaaaataaggctagtccgttatcaacttgaaaaagtggcaccgagtcggtgctttttttttgcggccgcgtctaaaaacggcccctaactaacgcttagttgcccgctagattagtcccccgttagtgcctagttagacacacgacgaactaggggctagaattcctgcaaattgggttagcaaaacaaatctagtctaggtgtgttttgcgatccgatcgatggggatttatccccgtggggaacggggatggggaagaaatgtctctcgcaagagttcgtgggaatccccgcgggaaatttttttgtcgcggggacggatacggggagccaaagggtgccatccctaacaccgacaccgggcctgacgctgtcgccgcagctgctcatcttgtggttgtgggctgtgcccggtttccctgttgcggattgcgggtggcagcctggcaggtgggtgcgacccgtttggattcccttgtctgggccccttgtgtcagtaccgtctgtactccgatgacatgcaccgtcgtccacagtcaagtccaaaatctcccctctttttttaacggaacagttcaaaacctccttgacgcacgctgtcgtgtaccagcactcggtggacaccacgtttgtaatccaggccgacacgtcggtcccacgtcgacaggccccaccgtccggtctgtagcgtgtacgtattcgggcgacggacgtgtcgtcgtcgtcttgcgagtcccattcccatcaccatctgagccacacatcctctgaacaaaagcagggaggcctccacgcacatccccctttctcccactccgtgtccgtggcacccaccccaaaccctcgcgccgcctccgagacagccgccgcaaccatggccaccgccgccgccgcgtctaccgcgctcactggcgccactaccgctgcgcccaaggcgaggcgccgggcgcacctcctggccacccgccgcgccctcgccgcgcccatcaggtgctcagcggcgtcacccgccatgccgatggctcccccggccaccccgctccggccgtggggccccaccgagccccgcaagggtgctgacatcctcgtcgagtccctcgagcgctgcggcgtccgcgacgtcttcgcctaccccggcggcgcgtcgatggagatccaccaggcactcacccgctcccccgtcatcgccaaccacctcttccgccacgagcaaggggaggcctttgccgcctccggctacgcgcgctcctcgggccgcgtcggcgtctgcatcgccacctccggccccggcgccaccaacctagtctccgcgctcgccgacgcgctgctcgattccgtcccgatggtcgccatcacgggacaggtggcgcgacgcatgattggcaccgacgccttccaggagacgcccatcgtcgaggtcacgcgctccatcaccaagcacaactacctggtcctcgacgtcgacgacatcccccgcgtcgtgcaggaggctttcttcctcgcctcctctggtcgaccagggccggtgcttgtcgacatccccaaggacatccagcagcagatggcggtgcctgtctgggacaagcccatgagtctgcctgggtacattgcgcgccttcccaagccccctgcgactgagttgcttgagcaggtgctgcgtcttgttggtgaatcgcggcgccctgttctttatgtgggcggtggctgcgcagcatctggtgaggagttgcgacgctttgtggagctgactggaatcccggtcacaactactcttatgggcctcggcaacttccccagcgacgacccactgtctctgcgcatgctaggtatgcatgggacggtgtatgcaaattatgcagtggataaggccgatctgttgcttgcacttggtgtgcggtttgatgatcgcgtgacagggaagattgaggcttttgcaagcagggctaagattgtgcacgttgatattgatccggctgagattggcaagaacaagcagccacatgtgtccatctgtgcagatgttaagcttgctttgcagggcatgaatgctcttcttgaaggaagcacatcaaagaagagctttgactttggctcatggaacgatgagttggatcagcagaagagggaattcccccttgggtataaaacatctaatgaggagatccagccacaatatgctattcaggttcttgatgagctgacgaaaggcgaggccatcatcggcacaggtgttgggcagcaccagatgtgggcggcacagtactacacttacaagcggccaaggcagtggttgtcttcagctggtcttggggctatgggatttggtttgccggctgctgctggtgcttctgtggcaaacccaggtgtcactgttgttgacatcgatggagatggtagctttctcatgaacgttcaggagctagctatgatccgaattgagaacctcccagtgaaggtctttgtgctaaacaaccagcacctggggatggtggtgcagttggaggacaggttctataaggccaacagagcgcacacatacttgggaaacccagagaatgaaagtgagatatatccagatttcgtgacgatcgccaaagggttcaacattccagccgtccgtgtgacaaagaagaacgaagtccgcgcagcgataaagaagatgctcgagactccagggccgtacctcttggatataatcgtcccacaccaggagcatgtgttgcctatgatccctagtggtggggctttcaaggatatgatcctggatggtgatggcaggactgtgtactgacttcgaataggtacccggggatcctctagtgccgtgggtcgtttaagctgccgctgtacctgtgtcgtctggtgccttctggtgtacctgggaggttgtcgtctatcaagtatctgtggttggtgtcatgagtcagtgagtcccaatactgttcgtgtcctgtgtgcattatacccaaaactgttatgggcaaatcatgaataagcttgatgttcgaacttaaaagtctctgctcaatatggtattatggttgtttttgttcgtctcctaatatttgcctgggatcaaattttattggctggtgttcatttgacctccatgttcttgctaggctccattttttactctacagccataatatgtttgattgtttggtttgttctttgttgtacacctggttctgtcgagcttagttttcgacactggcttacagcttaacatgttgctattttattgggttctgattgctattttattgggttctgattgctagtttttgctgaatccaaaaaccatgttatttatttaagcgatccaggttattattatgatggtggctaagtttttttttttccaagggtaaattttctggattctccagtgtttctgtggccgaattcaatcactagagtcgacctgcagtcacccggtccgggcctagaaggccacccggggtcggaggagactagccgttagttagtgcagaccgtctctaatcagtgactagcgacgtcccgacccacccagctttcttgtacaaagtggccgttaacggatcggccagaatggcccggaccgggttaccccggaatcggacctcgggacgtcgccaaagttagctaggtgtccttagcgtttcttaggttctaggcgttaggggtcaataggttagcctagaagtcccgcactaacagcctagcttaacagttccaagctaagccactagactagccctatccgactaacctagtctaagccgaacggggatctaatctaagctaggcacccattagactagttcactagcgcgaccgcactaaactaggctaaaggttaatagcaactagttagctaggggacgttagctgcccaagcttgcataatgaggatcgaggatgaggagcatgcacggatagatggcgtctagcatatcgataggacatgacaagtggtacgatccccgtcacatgtccatggaggcatctgatatggacacggcgtgtatctatcgcggctggaacagaaccagcgctcgcgcggcggtcggcgggagggacagaccttggctccgtgcgttcaggttgtgcttgtgccgcgcgccacgcacggtctccgccgcctgcagctgaaattttagatttacatcctatccctttattttttttatttgtcacaattcagttcaaaaatgaagaacggaggtagtgcatcctttgtgagactaatgaaaatcacatctggatcctgaaatcggcgtcgtaacctacaaggccacggactggattagatagtggtccatggtgcataatgaggatcgaggggtaccagtctaattacaaaactaattgcacaaccgctaagctgaatcgcgagatggatctattaaccttaattagtccatgatttgacaatgtggtgctacaataaccatttgctaatgatggattacttaggtttaatagattcgtctcgtgatttagcctatgggttctgctattaattttgtaattagctcatatttagttcttataattagtatccgaacatccaatgtgacatgctaaagtttaaccctggtatccaaatgaagtcttatgagagtttcatcactccggtggtatatgtacttaggctccgttttcttccaccgacttatttttagcacccgtcacattgaatgtttagatactaattagaagtattaaacgtagactatttacaaaatccattacataagacgaatctaaacggcgagacgaatctattaaacctaattagtccatgatttgacaatgtgttgctacagtaaacatttgctaatgatggattaattaggcttaatagattcgtctcgccgtttagcctccacttatgtaatgggttttctaaacaatctacgtttaatactcctaattagtatctaaatattcaatgtgacacgtgctaaaaataagtcagtggaaggaagagaacgtccccttagttttccatcttattaattgtacgatgaaactgtgcagccagatgattgacaatcgcaatacttcaactagtgggccatgcacatcagcgacgtgtaacgtcgtgagttgctgttcccgtagagaaatatcaactggtgggccacgcacatcagcgtcgtgtaacgtggacggaggagccccgtgacggcgtcgacatcgaacggccaccaaccacggaaccacccgtccccacctctcggaagctccgctccacggcgtcgacatctaacggctaccagcaggcgtacgggttggagtggactccttgcctctttgcgctggcggcttccggaaattgcgtggcggagacgaggcgggctcgtctcacacggcacggaagacgtcacgggttccttccccacctctcctcttccccaccgccataaatagccgaccccctcgcctttctccccaatctcatctcgtctcgtgttgttcggagcacaccacccgccccaaatcgttcttcccgcaagcctcggcgatccttcacccgcttcaaggtacggcgatcgtcttcctcctctagatcggcgtgatctgcaagtagttgatttggtagatggttaggatctgtgcactgaagaaatcatgttagatccgcgatgtttctgttcgtagatggctgggaggtggaatttttgtgtagatctgatatgttctcctgtttatcttgtcacgctcctgcgatttgtggggattttaggtcgttgatctgggaatcgtggggttgcttctaggctgttcgtagatgaggtcgttctcacggtttactggatcattgcctagtagatcagctcgggctttcgtctttgtatatggtgcccatacttgcatctatgatctggttccgtggtgttacctaggtttctgcgcctgattcgtccgatcgattttgttagcatgtggtaaacgtttggtcatggtctgatttagattagagtcgaataggatgatctcgatctagctcttgggattaatatgcatgtgtcaccaatctgttccgtggttaagatgatgaatctatgcttagttaatgggtgtagatatatatgctgctgttcctcaatgatgccgtagcttttacctgagcagcatggttcctcctgttacttaggtagatgcacatgcttatagatcaagatatgtactgctactgttggaattgtttagtatacctgatgatcatccatgctcttgttacttgttttggtatacttggatgatggcatgctgctgctttttgttgatttgagcccatccatatctgcatatgtcacatgattaagatgattacgctgtttctgtatgatgccatagcttttatgtgagcaacatgcatcctcctggttatatgcattaatagatggaagatatctattgctacaatttgatgattattttgtacatacgatgatcaagcatgctcttcatactttgttgatatacttggataatgaaatgctgctgcacgttcattctatagcactaatgatgtgatgaacacgcacgacctgtttgtggcatctgtttgaatgtgttgttgctgttcactagagactgttttattaacctactgctagatacttacccttctgtctgtttattcttttgcaggtcgaccgccggggatccatggttgaacaagatggattgcacgcaggttctccggccgcttgggtggagaggctattcggctatgactgggcacaacagacaatcggctgctctgatgccgccgtgttccggctgtcagcgcaggggcgcccggttctttttgtcaagaccgacctgtccggtgccctgaatgaactgcaggacgaggcagcgcggctatcgtggctggccacgacgggcgttccttgcgcagctgtgctcgacgttgtcactgaagcgggaagggactggctgctattgggcgaagtgccggggcaggatctcctgtcatctcaccttgctcctgccgagaaagtatccatcatggctgatgcaatgcggcggctgcatacgcttgatccggctacctgcccattcgaccaccaagcgaaacatcgcatcgagcgagcacgtactcggatggaagccggtcttgtcgatcaggatgatctggacgaagagcatcaggggctcgcgccagccgaactgttcgccaggctcaaggcgcgcatgcccgacggcgatgatctcgtcgtgacccatggcgatgcctgcttgccgaatatcatggtggaaaatggccgcttttctggattcatcgactgtggccggctgggtgtggcggaccgctatcaggacatagcgttggctacccgtgatattgctgaagagcttggcggcgaatgggctgaccgcttcctcgtgctttacggtatcgccgctcccgattcgcagcgcatcgccttctatcgccttcttgacgagttcttctgagcccatcggtcatggatgcttctactgtacctgggtcgtctggtctctgcctgtgtcacctttgaagtacctgtgtcgggattgtgtttggtctagaactgcagtttgtctttgatgttcttttgtctggtcttatgaactggttgtatctgtatgtttactgtaaactgttgttgcggtgcagcagtatggcatccgaatgaataaatgatgtttggacttaaatctgtactctgtttgttttcggttatgccagttctatattgcctgagatcagaatgtttagcttttgagttctgtttggcttgtggtcgactcctgtttcttacttgaggcgtaactctgttctggcaaactcaaatgtctaactgaatgttttaggacttaattgttggacagattaacgtgtttggtttgtttctagattgtgattcggaaggcttgttagttgtggaatcaaggagagcagctaggtctgtgcagaacgttattttggatttaagccttctcagattatgccattactctaaacctaatgatatcatatttcactcggggatgttggagtagtcttttctttctcctgcagacaaaatgattttgctttcgtgtgtgtacatgattttgtgcaactgttgcaacaactgaagtagacaagttttgacctcaccagaagaatgaaaaagattttggaatttgttacatcgacaaaccattgtaacttggcccatcagaatgcacagagaagcggctacaaattgacatgcgttgcaaactttgcaatagttgatgcacatgtttgccattgcctgccagtcttaggaaaagtgtgtggttcgagaaatctaagcatatgtgctctgctcacattgcgtggaacccacacagctttgtcacactcttgtccactccagaagtcattcctggcgctgtttacccctggtaaagagtaaccgaaaacttctcaaggctgtacccaaaactggaaggaaatttggaggcggccgcatgaggagcaatcattgttcaagacatgatgcaaagctagaaaactttgattgtggccgtccttgtgaagtttaggccggggggaacttcatgaaccctatcgaagcttaattagttcttttttgttgttagccatgtttgtattgtagttaaggtgaacaacatgacgccgcacccgcgatctcagggctcgtccccacacaggagggcacgtcgtcgtcttcgccgccgagcatcagagattcagagcacatacacgcacatctcaagcaaacggagtagtacgtcctactcctacgtacatacctagccgacgacctttatgtgcacaccaccactgctctgctgcccggcctctccgtcgtccgttcatcaccagcataatgaggatcgaggatgaggggcgcgccgacgtcccgaggtccgattccgggctaattaacacctagctcgccactcgactaattagggactaagcctagcgcttagccgttaaaacctagcacaccctaagcacccttagttaggttcccctcttaattaagccctagtgagcccctaagttaaggggacgctaagagccccctaacctagtattcggctagaggcgaactaggctaaacacctaagcgcacctctttaagctagatcgctagggggctaggctagagcttcgctagattagtctaagggcagcctgcagggccctcttgtcggaccagttgcccaccacgttggtgaggggcaactttattatacaaagttgatagataaatcagatatcgaccctagtcacttactgcccttaaggccaattgttcaagattcattcaacaattgaaacatctcccatgattaaatcagtataaggttgctatggtcttgcttgacaaagtttttttttgagggaatttcaactaaatttttgagtgaaactatcaaatactgattttaaaaaatttttataaaaggaagcgcagagataaaaggccatctatgctacaaaagtacccaaaaatgtaatcctaaagtatgaattgcattttttttttgtttggacgaaaggaaaggagtattaccacaagaatgatatcatcttcatatttagatcttttttgggtaaagcttgagattctctaaatatagagaaatcagaagaaaaaaaaaccgtgttttggtggttttgatttctagcctccacaataactttgacggcgtcgacaagtctaacggacaccaagcagcgaaccaccagcgccgagccaagcgaagcagacggccgagacgttgacaccttcggcgcggcatctctcgagagttccgctccggcgctccacctccaccgctggcggtttcttattccgttccgttccgcctcctgctctgctcctctccacaccacacggcacgaaaccgttacggcaccggcagcacccagcacgggagaggggattcctttcccaccgttccttccctttccgccccgccgctataaatagccagccccatccccagcttttttccccaatctcatctcctctctcctgttgttcggagcacacgcacaatccgatcgatccccaaatccccttcgtctctcctcgcgagcctcgtggatcccagcttcaaggtacggcgatcgatcatcccccctccttctctctaccttcttttctctagactacatcggatggcgatccatggttagggcctgctagtttcccttcctgttttgtcgatggctgcgaggcacaatagatctgatggcgttatgacggctaacttgtcatgttgttgcgatttatagtccctttaggagatcagtttaatttctcggatggttcgagatcggtggtccatggttagtaccctaagatccgcgctgttagggttcgtagatggaggcgacctgttctgattgttaacttgtcagtacctgggaaatcctgggatggttctagctcgtccgcagatgagatcgatttcatgatcctctgtatcttgtttcgttgcctaggttccgtctaatctatccgtggtatgatgtagatgttttgatcgtgctaactacgtcttgtaaagttaattgtcaggtcataatttttagcatgcctttttttttgtttggttttgtctaattgggctgtcgttctagatcagagtagaagactgttccaaactacctgctggatttattgaacttggatctgtatgtgtgtcacatatcttcataaattcatgattaagatggattgaaatatcttttatctttttggtatggatagttctatatgttggtgtggctttgttagatgtatacatgcttagatacatgaagcaacgtgctgctactgtttagtaattgctgttcatttgtctaataaacagataaggatatgtatttatgttgctgttggttttgctggtactttgttggatacaaatgcttcaatacagaaaacagcatgctgctacgatttaccatttatctaatcttatcatatgtctaatctaataaacaaacatgcttttaaattatcttcatatgcttggatgatggcatacacagcggctatgtgtggttttttaaatacccagcatcatgggcatgcatgacactgctttaatatgctttttatttgcttgagactgtttcttttgtttatactgaccctttagttcggtgactcttctgcaggtcgactttaacttagcctaggatccatggcccagtccaagcacggcctgaccaaggagatgaccatgaagtaccgcatggagggctgcgtggacggccacaagttcgtgatcaccggcgagggcatcggctaccccttcaagggcaagcaggccatcaacctgtgcgtggtggagggcggccccttgcccttcgccgaggacatcttgtccgccgccttcatgtacggcaaccgcgtgttcaccgagtacccccaggacatcgtcgactacttcaagaactcctgccccgccggctacacctgggaccgctccttcctgttcgaggacggcgccgtgtgcatctgcaacgccgacatcaccgtgagcgtggaggagaactgcatgtaccacgagtccaagttctacggcgtgaacttccccgccgacggccccgtgatgaagaagatgaccgacaactgggagccctcctgcgagaagatcatccccgtgcccaagcagggcatcttgaagggcgacgtgagcatgtacctgctgctgaaggacggtggccgcttgcgctgccagttcgacaccgtgtacaaggccaagtccgtgccccgcaagatgcccgactggcacttcatccagcacaagctgacccgcgaggaccgcagcgacgccaagaaccagaagtggcacctgaccgagcacgccatcgcctccggctccgccttgccctccggactcagatctcgatagggtaccaatggccagttaacagatccagctgctgctgttctagggttcacaagtctgcctatttgtcttccccaatggagctatggttgtctggtctggtccttggtcgtgtcccgtttcattgtgtactatttacctgtaatgtgtatccttaagtctggtttgatggtgtctgaaacgttttgctgtggtagagcagcatggaagaactataatgaataagtgatccctaatcattgtgtccaaattttgcttctgctatacccttttgtgctgtttcttatgttttgcttaaaaatttgatctgacaaacaaatttgtctaaattatgctcttgttctgactgtgtactgtacacatttgtattgctaccggtttggcacatagttttctctttgattgcagatcaaacccttctgattgcagattgcttggctatggctgatgtgctcactgttcttctttagcttgtatattgctgatggtggcttggctacggctgaaaaagttgctgctgcgccgacttggcaactgttgctccagtaatgctttgtcctctcttcctagccgccgacttggcacttggcagctgttgctcctgtaatgcgttgttatctcttatctcttgagatgtactatgattttgaggctgtttgacttgtgccagattgccagtgctgatgctatattatctcaggtttttatgctagtatatgttttactgtgtgctgcctgtgtcgagttacgtaatctattgaaccgctatgcgtgttgatgccctgttgttgcttgccagattgatgcccctgttgcttgcagcttgcaagctgtagtgaaatcctaaaattcgaaaccaaatctattctgaacttttgaagatctgtgatgtccggaagaaaagattcaaacagataaacgggactctccagaatctataaaataaatgatcgacaaacgctttgctttggtaggcttcctagttagttagcggaccgaagcttcggttgtttctgtggccgaattcaatcactagagtcgacctgcatgattccgatgacttcgtaggttcctagctcaagccgctcgtgtccaagcgtcacttacgattagctaatgattacggcatctaggaccgactagctagctagctaagagctcggtaccgagctcgaattcattccgattaatcgtggcctcttgctcttcaggatgaagagctatgtttaaacgtgcaagcgctactagacaattcagtacattaaaaacgtccgcaatgtgttattaagttgtctaagcgtcaatttgtttacaccacaatatatcctgcca

SEQ ID NO: 284 - DNA, 20851 bp, synthetic construct
  misc_feature 1..20851: note = PHP97978
  source 1..20851: mol_type = other DNA
gtttacccgccaatatatcctgtcaaacactgcggccgcacttgaccgcggatggagccggagctgtggtgaggccatcgacgggaggtgggggagaacacagtctcagtgttctttgtgagtccgcaaggtttttagcttttctgtattaattaaggttgctgttggctgtagaatacggtcgtggaagagctgtatcggtagctactacgtaagctattatatactggaagtctggagctcgtcgatctccggtcgtcttcctccatttctcctcgtcttgctttgactgctgctaccatttgcttctgttttctgatgaagcatgccatgtcggccaccagtgtttgtgtggtttttgcagggaatggctttcaagtgctgtgattgaatggccctcgtcgtcctcggctgagctcacatggacgcgtcatgtgagtgagatatatgatcatatgatgagtggggttcgggtgagtgcgtacttgaagtaggatcccgctttcactcattcattcattggcctttaaaccgggaaattttcgcgaggagatggagggaagcaagcagggtgacgagtgcagagtgccgcgagcgctttgtcaaaaggcaccgccgtaggcaaaaaaatcaatggccctgactgactcgatggtagtactactgtagagactagagagggttgctccccatatcttcgtgtgacttttactccagcattgcatttccgtcattgagacgttaattaatagcagctttcgggacagatgactgtggccatgtttcgtcacggccgcttcgtgccagctgggggtactatagtactgtgattttgttagtaaaaactttcattaggccaccattgacgaccgggccttcgcttttgctgcgctaattaaccatttcccggcgaccgaagggaacatgaacatgccccgacacatgagggcatgaggactagtgttctccctgtcgttcgttgacttgactagtgatagtttaaacgctcttcaactggaagagcggttactaccggttcactagctagctgctaatcgagctagttaccctatgaggtgacatgaagcgctcacggttactatgacggttagcttcacgactgttggtggcagtagcgtacgacttagctatagttccggacttacctagctaataacttcgtatagcatacattatacgaagttatggttacctcgcgacggaccgggttaccaagcggccgcacactgatagtttaaactgaaggcgggaaacgacaatctgatcatgagcggagaattaagggagtcacgttatgacccccgccgatgacgcgggacaagccgttttacgtttggaactgacagaaccgcaacgattgaaggagccactcagccgcgggtttctggagtttaatgagctaagcacatacgtcagaaaccattattgcgcgttcaaaagtcgcctaaggtcactatcagctagcaaatatttcttgtcaaaaatgctccactgacgttccataaattcccctcggtatccaattagagtctcatattcactcccatggcggccaatgcgggcggcggtggagcgggaggaggcagcggcagcggcagcgtggctgcgccggcggtgtgccgccccagcggctcgcggtggacgccgacgccggagcagatcaggatgctgaaggagctctactacggctgcggcatccggtcgcccagctcggagcagatccagcgcatcaccgccatgctgcggcagcacggcaagatcgagggcaagaacgtcttctactggttccagaaccacaaggcccgcgagcgccagaagcgccgcctcaccagcctcgacgtcaacgtgcccgccgccggcgcggccgacgccaccaccagccaactcggcgtcctctcgctgtcgtcgccgccgccttcaggcgcggcgcctccctcgcccaccctcggcttctacgccgccggcaatggcggcggatcggctgtgctgctggacacgagttccgactggggcagcagcggcgctgctatggccaccgagacatgcttcctgcaggactacatgggcgtgacggacacgggcagctcgtcgcagtggccacgcttctcgtcgtcggacacgataatggcggcggccgcggcgcgggcggcgacgacgcgggcgcccgagacgctccctctcttcccgacctgcggcgacgacggcggcagcggtagcagcagctacttgccgttctggggtgccgcgtccacaactgccggcgccacttcttccgttgcgatccaacagcaacaccagctgcaggagcagtacagcttttacagcaacagcaacagcacccagctggccggcaccggcaaccaagacgtatcggcaacagcagcagcagccgccgccctggagctgagcctcagctcatggtgctccccttaccctgctgcagggagtatgtgagagcaacgcgagctgccactgctcttcactgatgtctctggaatggaaggaggaggaagtgagaacagatcattcgacaaagcagcattagtccgttgatcggtggaagaccactcgtcagtgttgagttgaatgtttgatcaataaaatacggcaatgctgtaagggttgttttttatgccattgataatacactgtactgttcagttgttgaactctatttcttagccatgccaagtgcttttcttattttgaataacattacagcaaaaagttgaaagacaaaaaaaaaaacccccgaacagagtgctttgggtcccaagcttctttagactgtgttcggcgttccccctaaatttctccccctatatctcactcacttgtcacatcagcgttctctttccccctatatctccacgctctacagcagttccacctatatcaaacctctataccccaccacaacaatattatatactttcatcttcaactaactcatgtaccttccaatttttttctactaataattatttacgtgcacagaaacttagcaaggagagagagagcgggaatttaaatgctcggcgttaggcttttagtccgctaggtggctagaccgaggttaggacgctagttcactaggggcctagtggtgttttaagacgtcacggtcaccacgcgtggaccgaagcttgcatgcctgcagtgcagcgtgacccggtcgtgcccctctctagagataatgagcattgcatgtctaagttataaaaaattaccacatattttttttgtcacacttgtttgaagtgcagtttatctatctttatacatatatttaaactttactctacgaataatataatctatagtactacaataatatcagtgttttagagaatcatataaatgaacagttagacatggtctaaaggacaattgagtattttgacaacaggactctacagttttatctttttagtgtgcatgtgttctcctttttttttgcaaatagcttcacctatataatacttcatccattttattagtacatccatttagggtttagggttaatggtttttatagactaatttttttagtacatctattttattctattttagcctctaaattaagaaaactaaaactctattttagtttttttatttaataatttagatataaaatagaataaaataaagtgactaaaaattaaacaaataccctttaagaaattaaaaaaactaaggaaacatttttcttgtttcgagtagataatgccagcctgttaaacgccgtcgacgagtctaacggacaccaaccagcgaaccagcagcgtcgcgtcgggccaagcgaagcagacggcacggcatctctgtcgctgcctctggacccctctcgagagttccgctccaccgttggacttgctccgctgtcggcatccagaaattgcgtggcggagcggcagacgtgagccggcacggcaggcggcctcctcctcctctcacggcaccggcagctacgggggattcctttcccaccgctccttcgctttcccttcctcgcccgccgtaataaatagacaccccctccacaccctctttccccaacctcgtgttgttcggagcgcacacacacacaaccagatctcccccaaatccacccgtcggcacctccgcttcaaggtacgccgctcgtcctcccccccccccctctctaccttctctagatcggcgttccggtccatgcatggttagggcccggtagttctacttctgttcatgtttgtgttagatccgtgtttgtgttagatccgtgctgctagcgttcgtacacggatgcgacctgtacgtcagacacgttctgattgctaacttgccagtgtttctctttggggaatcctgggatggctctagccgttccgcagacgggatcgatttcatgattttttttgtttcgttgcatagggtttggtttgcccttttcctttatttcaatatatgccgtgcacttgtttgtcgggtcatcttttcatgcttttttttgtcttggttgtgatgatgtggtctggttgggcggtcgttctagatcggagtagaattctgtttcaaactacctggtggatttattaattttggatctgtatgtgtgtgccatacatattcatagttacgaattgaagatgatggatggaaatatcgatctaggataggtatacatgttgatgcgggttttactgatgcatatacagagatgctttttgttcgcttggttgtgatgatgtggtgtggttgggcggtcgttcattcgttctagatcggagtagaatactgtttcaaactacctggtgtatttattaattttggaactgtatgtgtgtgtcatacatcttcatagttacgagtttaagatggatggaaatatcgatctaggataggtatacatgttgatgtgggttttactgatgcatatacatgatggcatatgcagcatctattcatatgctctaaccttgagtacctatctattataataaacaagtatgttttataattattttgatcttgatatacttggatgatggcatatgcagcagctatatgtggatttttttagcactgccttcatacgctatttatttgcttggtactgtttcttttgtcgatgctcaccctgttgtttggtgttacttctgcaggtcgactttaacttagcctaggatccatggccactgtgaacaactggctcgctttctccctctccccgcaggagctgccgccctcccagacgacggactccacactcatctcggccgccaccgccgaccatgtctccggcgatgtctgcttcaacatcccccaagattggagcatgaggggatcagagctttcggcgctcgtcgcggagccgaagctggaggacttcctcggcggcatctccttctccgagcagcatcacaaggccaactgcaacatgatacccagcactagcagcacagtttgctacgcgagctcaggtgctagcaccggctaccatcaccagctgtaccaccagcccaccagctcagcgctccacttcgcggactccgtaatggtggcttcctcggccggtgtccacgacggcggtgccatgctcagcgcggccgccgctaacggtgtcgctggcgctgccagtgccaacggcggcggcatcgggctgtccatgattaagaactggctgcggagccaaccggcgcccatgcagccgagggtggcggcggctgagggcgcgcaggggctctctttgtccatgaacatggcggggacgacccaaggcgctgctggcatgccacttctcgctggagagcgcgcacgggcgcccgagagtgtatcgacgtcagcacagggtggagccgtcgtcgtcacggcgccgaaggaggatagcggtggcagcggtgttgccggcgctctagtagccgtgagcacggacacgggtggcagcggcggcgcgtcggctgacaacacggcaaggaagacggtggacacgttcgggcagcgcacgtcgatttaccgtggcgtgacaaggcatagatggactgggagatatgaggcacatctttgggataacagttgcagaagggaagggcaaactcgtaagggtcgtcaagtctatttaggtggctatgataaagaggagaaagctgctagggcttatgatcttgctgctctgaagtactggggtgccacaacaacaacaaattttccagtgagtaactacgaaaaggagctcgaggacatgaagcacatgacaaggcaggagtttgtagcgtctctgagaaggaagagcagtggtttctccagaggtgcatccatttacaggggagtgactaggcatcaccaacatggaagatggcaagcacggattggacgagttgcagggaacaaggatctttacttgggcaccttcagcacccaggaggaggcagcggaggcgtacgacatcgcggcgatcaagttccgcggcctcaacgccgtcaccaacttcgacatgagccgctacgacgtgaagagcatcctggacagcagcgccctccccatcggcagcgccgccaagcgcctcaaggaggccgaggccgcagcgtccgcgcagcaccaccacgccggcgtggtgagctacgacgtcggccgcatcgcctcgcagctcggcgacggcggagccctggcggcggcgtacggcgcgcactaccacggcgccgcctggccgaccatcgcgttccagccgggcgccgccagcacaggcctgtaccacccgtacgcgcagcagccaatgcgcggcggcgggtggtgcaagcaggagcaggaccacgcggtgatcgcggccgcgcacagcctgcaggacctccaccacctgaacctgggcgcggccggcgcgcacgactttttctcggcagggcagcaggccgccgccgctgcgatgcacggcctgggtagcatcgacagtgcgtcgctcgagcacagcaccggctccaactccgtcgtctacaacggcggggtcggcgacagcaacggcgccagcgccgtcggcggcagtggcggtggctacatgatgccgatgagcgctgccggagcaaccactacatcggcaatggtgagccacgagcaggtgcatgcacgggcctacgacgaagccaagcaggctgctcagatggggtacgagagctacctggtgaacgcggagaacaatggtggcggaaggatgtctgcatgggggactgtcgtgtctgcagccgcggcggcagcagcaagcagcaacgacaacatggccgccgacgtcgggcatggcggcgcgcagctcttcagtgtctggaacgacacttaagcgtacctagtggtacctgacatcttatagtctgcaacctctcgtgtctgaattcctatctttatcaagtgttattgcttccacgactataggacagctttcgtcgaaagcttttgctcatgtgatctcgaaggattcatctagtctgatttttcgtgacttgtatcggttttattggattcatccaacatatatcaataaaaaatgagttgtgtttcctttcttcctagttcagttaaaattatttccctcctgcgcttgtgctgtaattgtctgtgtacctgttgtttgtgactgtgttagttcccttggatatgatttcgtatttgatatgtacatggagatagcttagcttcattattggagtatgaagttagtatgacatagtcactctcctggaaaattgacactgcaaaccatatttttattctgaaccacaaatcctagtcagtccgctggcatatgccgtccgtttgctgaatccagaacgtgggtttggagatgtacggctgagatgcctctatgcgaaggggatttcgtggtgaaacgagatgggagtagagcaacgcccgtggaagatgcttcaaacttccacacttttgagcaacgatcggcagtagtaaggtagacgatttcaagatcaaagcatatgaagataaacaacatcaacaacaaaatttgttggggttctatagagagaaacagagctacatacatacactgttttgtatctaccatctgagatgatgaaaagatgaaaaactaaagaatgccccggcgccaacgccaggacacgccgcgcgcgcgtcacccgagccatctcttgacccagccggcgctgtatatttacacacgttgcagcatcgatcaccacctgttcgatcgcgtcgccgtcaccggcgcgccgcgacttattgaactagtctagggcgcggctaacaacctagcttagattgccttgtctaaacccttaaggctaacgcgccactctagattcttatgtgcttctagtctccaaatgtggttgatagttattttgctctaagatcaacagtaatgaagtataaatcatcgttgtggtgtgctactcggttaattgagcattaacacacacaaacatgacgaggatggtataatctccaaaaatgtgtactttgttaggtgggaccctatagccttgattaatgtgctatgttaggcatgcctggaaacgtgtgacgcatatgttttgtgaacctgttgatattatatgtgcttttatattaccatattttattaaaatactaatatttattactagtaagatataacattctatctagcttaaaaactaaccataaatattccataataactagatttaccaaactaatatactaaatatacataataaatacaaaattaacaagacaataatcaatatttatgagcttaatatatttagacattatggttggtcgacgataatcatgctaacttttcgtaattgcttgattgaaatatgcttagaataatgcctctttgttctacatggcaaatagggaccattatggtgtaacaccctgggaaccacaaacaccccgaaatgctactaaactacacaactaaccttcatatataaaatttcgacagcatctcctttgaaaatttgcatagacgtggaagcaacagagtataaacagatatcatgataagaaaacatactagacattaataatctgctagaaatgggaagaatcgagctcggtaccctggttcacaaactcaatacaacacacagtggagtagggtattacgctccggcggcccgaaccactctaaatccttgtgtcctcgtgtgctcttccaccattaatgactgtaattgcagggacacgaagagttgtagcgcttttgccaacaagatccgctatatgctagtagagtggaacctgcacagcaacaagcatccaataatctgagaataagaattatgtgtggtgatggttctcatctctgcaactcgccattttcgcgagagaaccaaatccaagttggtgaagatcatgatttgggctcatgggctggcatagtagctattacctttgcaattgtggttcgaatctatccgatattctccttttcagggagagctaatgcttatgcttattgggtattttggtttgacactgcttcacgcccaaaaaaaggcaactatgtctgagttggatatggcccaaaaaaaggcagctatgtctgagttggatatggaagtcttctttcgtttagggtgaagtaagaccaagctcatgagcttattatcttaggtcggaacaaattagttgataggcatggcacatttatcaaattataatgattttaacagaaaagcaacacctctttttcagcagcaccagctttgcaagctgcaattgacactccaagcatagtatttgctccaaactcagcctgcatttcgcacaatatcatatctatttccatttggataaaatatattttccagaaatatgggaacagaatcaagatacagaaaaaagttgtggtagtagtggtaagtggaaacacaagtacagtgaaaagatagcattatttctgaacagtcaaattaaccgaaataagtagtatcacatactgcccctaaattgactacacccaatgtaaagaattgcttgagcatattgagccatcagttgtttgtttgtgtaacggatttgacaatgcagagttcaggagcaaaaaaccgcaaaggagagaaagagggaaaggatctcctagtatcccaccttgtggcgcgccctgtcaagtgcatgatggcctggtcgatctgcgtctgctgctgcggttccatcccaacgagtgcctccgacaccttgtcgttgatcacccgcaccgcgtaggcgacccccctggcgaggaacttccgcctctcggaggccccggccgcgtcggcggcggcgccctcgagcgcgcccacgctagccgtagatgctcggtgcacggccttgttggtgtgcaactcgacctcaacggccggtgcgctacgcccgtcaaggatctggcgcgcccgcaccctcgtgatcacggtgggcgcctcccgcctcatgtggccgacgatgaaaagcgccgggttaggggccttggcgcgcaccgccgtattcagggcctcctcgctcttgcgcgagagcaggtgcttccccaggtactcctgcactgacaaggctgccacagcggtggaatttgtcctcacgacttcgccacgtcgtcctcacctccctggcttcccacgactccgccgtatcgaggtgctcggtgggtcgtcttaatccgaagtccgaactaggaagacgagacagagaggtctgaggaatgggcctcgtttgatgttgagctgaattatttttccagcataagcccaggtcttggtccatgaacaaaattactagaaacccagcccagtactacgatctaaaagagggactgccactggatagctctctctagcattctccacgctccaatacagcggcgtcgtgtctatccgggtctatccgcgaacacgtgagaactctccagaaactgctttctcctccacttcatctctctcgctttccctctataaaaagaccccttctaggaattgagggagacagcaagcaccaagcagcgatccgaagctcaatcaattcactcaaacctcttccccaaatcttcgattagatcttcgttgacaagaagactagaaccgaacctgacatgtccaacctgctcacggttcaccagaaccttccggctcttccagtggacgcgacgtccgatgaagtcaggaagaacctcatggacatgttccgcgacaggcaagcgttcagcgagcacacctggaagatgctgctctccgtctgccgctcctgggctgcatggtgcaagctgaacaacaggaagtggttccccgctgagcccgaggacgtgagggattaccttctgtacctgcaagcgcgaggtttgtttctgcttctacctttgatatatatataataattatcattaattagtagtaatataatatttcaaatatttttttcaaaataaaagaatgtagtatatagcaattgcttttctgtagtttataagtgtgtatattttaatttataacttttctaatatatgaccaaaacatggtgatgcctaggtctggcagtgaagaccatccagcaacaccttggacaactgaacatgcttcacaggcgctccggcctcccgcgccccagcgactcgaacgccgtgagcctcgtcatgcgccgcatcaggaaggaaaacgtcgatgccggcgaaagggcaaagcaggccctcgcgttcgagaggaccgatttcgaccaggtccgcagcctgatggagaacagcgacaggtgccaggacattaggaacctggcgttcctcggaattgcatacaacacgctcctcaggatcgcggaaattgcccgcattcgcgtgaaggacattagccgcaccgacggcggcaggatgcttatccacattggcaggaccaagacgctcgtttccaccgcaggcgtcgaaaaggccctcagcctcggagtgaccaagctcgtcgaacgctggatctccgtgtccggcgtcgcggacgacccaaacaactacctcttctgccgcgtccgcaagaacggggtggctgcccctagcgccaccagccaactcagcacgagggccttggaaggtattttcgaggccacccaccgcctgatctacggcgcgaaggatgacagcggtcaacgctacctcgcatggtccgggcactccgcccgcgttggagctgctagggacatggcccgcgccggtgtttccatccccgaaatcatgcaggcgggtggatggacgaacgtgaacattgtcatgaactacattcgcaaccttgacagcgagacgggcgcaatggttcgcctcctggaagatggtgactgaggtacccaacctagacttgtccatcttctggattggccaacttaattaatgtatgaaataaaaggatgcacacatagtgacatgctaatcactataatgtgggcatcaaagttgtgtgttatgtgtaattactagttatctgaataaaagagaaagagatcatccatatttcttatcctaaatgaatgtcacgtgtctttataattctttgatgaaccagatgcatttcattaaccaaatccatatacatataaatattaatcatatataattaatatcaattgggttagcaaaacaaatctagtctaggtgtgttttgcgatccgatatcgacgtctaaaaacggcccctaactaacgcttagttgcccgctagattagtcccccgttagtgcctagttagacacacgacgaactaggggctagccccgggataacttcgtatagcatacattatacgaagttatgaattccggaccgggttaccgaattcctgcccttaaggccaattgttcaagattcattcaacaattgaaacatctcccatgattaaatcagtataaggttgctatggtcttgcttgacaaagtttttttttgagggaatttcaactaaatttttgagtgaaactatcaaatactgattttaaaaaatttttataaaaggaagcgcagagataaaaggccatctatgctacaaaagtacccaaaaatgtaatcctaaagtatgaattgcattttttttttgtttggacgaaaggaaaggagtattaccacaagaatgatatcatcttcatatttagatcttttttgggtaaagcttgagattctctaaatatagagaaatcagaagaaaaaaaaaccgtgttttggtggttttgatttctagcctccacaataactttgacggcgtcgacaagtctaacggacaccaagcagcgaaccaccagcgccgagccaagcgaagcagacggccgagacgttgacaccttcggcgcggcatctctcgagagttccgctccggcgctccacctccaccgctggcggtttcttattccgttccgttccgcctcctgctctgctcctctccacaccacacggcacgaaaccgttacggcaccggcagcacccagcacgggagaggggattcctttcccaccgttccttccctttccgccccgccgctataaatagccagccccatccccagcttttttccccaatctcatctcctctctcctgttgttcggagcacacgcacaatccgatcgatccccaaatccccttcgtctctcctcgcgagcctcgtggatcccagcttcaaggtacggcgatcgatcatcccccctccttctctctaccttcttttctctagactacatcggatggcgatccatggttagggcctgctagtttcccttcctgttttgtcgatggctgcgaggcacaatagatctgatggcgttatgacggctaacttgtcatgttgttgcgatttatagtccctttaggagatcagtttaatttctcggatggttcgagatcggtggtccatggttagtaccctaagatccgcgctgttagggttcgtagatggaggcgacctgttctgattgttaacttgtcagtacctgggaaatcctgggatggttctagctcgtccgcagatgagatcgatttcatgatcctctgtatcttgtttcgttgcctaggttccgtctaatctatccgtggtatgatgtagatgttttgatcgtgctaactacgtcttgtaaagttaattgtcaggtcataatttttagcatgcctttttttttgtttggttttgtctaattgggctgtcgttctagatcagagtagaagactgttccaaactacctgctggatttattgaacttggatctgtatgtgtgtcacatatcttcataaattcatgattaagatggattgaaatatcttttatctttttggtatggatagttctatatgttggtgtggctttgttagatgtatacatgcttagatacatgaagcaacgtgctgctactgtttagtaattgctgttcatttgtctaataaacagataaggatatgtatttatgttgctgttggttttgctggtactttgttggatacaaatgcttcaatacagaaaacagcatgctgctacgatttaccatttatctaatcttatcatatgtctaatctaataaacaaacatgcttttaaattatcttcatatgcttggatgatggcatacacagcggctatgtgtggttttttaaatacccagcatcatgggcatgcatgacactgctttaatatgctttttatttgcttgagactgtttcttttgtttatactgaccctttagttcggtgactcttctgcaggtcgactttaacttagcctaggatccatggcccagtccaagcacggcctgaccaaggagatgaccatgaagtaccgcatggagggctgcgtggacggccacaagttcgtgatcaccggcgagggcatcggctaccccttcaagggcaagcaggccatcaacctgtgcgtggtggagggcggccccttgcccttcgccgaggacatcttgtccgccgccttcatgtacggcaaccgcgtgttcaccgagtacccccaggacatcgtcgactacttcaagaactcctgccccgccggctacacctgggaccgctccttcctgttcgaggacggcgccgtgtgcatctgcaacgccgacatcaccgtgagcgtggaggagaactgcatgtaccacgagtccaagttctacggcgtgaacttccccgccgacggccccgtgatgaagaagatgaccgacaactgggagccctcctgcgagaagatcatccccgtgcccaagcagggcatcttgaagggcgacgtgagcatgtacctgctgctgaaggacggtggccgcttgcgctgccagttcgacaccgtgtacaaggccaagtccgtgccccgcaagatgcccgactggcacttcatccagcacaagctgacccgcgaggaccgcagcgacgccaagaaccagaagtggcacctgaccgagcacgccatcgcctccggctccgccttgccctccggactcagatctcgatagggtaccaatggccagttaacagatccagctgctgctgttctagggttcacaagtctgcctatttgtcttccccaatggagctatggttgtctggtctggtccttggtcgtgtcccgtttcattgtgtactatttacctgtaatgtgtatccttaagtctggtttgatggtgtctgaaacgttttgctgtggtagagcagcatggaagaactataatgaataagtgatccctaatcattgtgtccaaattttgcttctgctatacccttttgtgctgtttcttatgttttgcttaaaaatttgatctgacaaacaaatttgtctaaattatgctcttgttctgactgtgtactgtacacatttgtattgctaccggtttggcacatagttttctctttgattgcagatcaaacccttctgattgcagattgcttggctatggctgatgtgctcactgttcttctttagcttgtatattgctgatggtggcttggctacggctgaaaaagttgctgctgcgccgacttggcaactgttgctccagtaatgctttgtcctctcttcctagccgccgacttggcacttggcagctgttgctcctgtaatgcgttgttatctcttatctcttgagatgtactatgattttgaggctgtttgacttgtgccagattgccagtgctgatgctatattatctcaggtttttatgctagtatatgttttactgtgtgctgcctgtgtcgagttacgtaatctattgaaccgctatgcgtgttgatgccctgttgttgcttgccagattgatgcccctgttgcttgcagcttgcaagctgtagtgaaatcctaaaattcgaaaccaaatctattctgaacttttgaagatctgtgatgtccggaagaaaagattcaaacagataaacgggactctccagaatctataaaataaatgatcgacaaacgctttgctttggtaggcttcctagttagttagcggaccgaagcttcggtccgggcctagaaggccagcttcggccgcccctcggtaccctgggatctgcccttactttaacgcctctaaccaacacccctttatctttataaggaacaataaacagaatttgccccactgttctaaatcacctaataatatccccagctaaaaacaataaaggtttcctagaattaagacaagcatgactgttcctccaggagggtttggaacattgttgcagtcttgcagatacgggcgaagggtgagaaacagagcggagggctggaggtgacctcggtagtcgacgccggagttgagcttgacaacgacggggcggcccctgatggacttgaggaagtccgatggcgtcttcaccgtcccgccggcgcccgaggcgggcctgtcgctgccgccgccgccgctgctcatcttgcgcgctgtgcccccggcggtgtccctgtgttgcggatcgcgggtgggccaggtggatgcgagggcgacccgtttggactccggccggagccgccggatccctggtcggtgtcagtgccgtttactctgggccccacgtgtcagtaccgtctgtagatgacaacaacccgtcgtccacagtcatgtccaaaatatcctttcttcttttttttcgattcggatatctatcttccttttttttttccaaaaatcttcttgacgcaccagcgcgcacgtttgtggtaaacgccgacacgtcggtcccacgtcgatagaccccacccaccagtgagtagcgtgtacgtattcgggggtgacggacgtgtcgccgtcgtcttgctagtcccattcccatctgagccacacatctctgaacaaaaaaaaggagggaggcctccacgcacatccccctccgtgccacccgccccaaaccctcgcgccgcctccgagacagccgccgcaaccatggccaccgccgccgccgcgtctaccgcgctcactggcgccactaccgctgcgcccaaggcgaggcgccgggcgcacctcctggccacccgccgcgccctcgccgcgcccatcaggtgctcagcggcgtcacccgccatgccgatggctcccccggccaccccgctccggccgtggggccccaccgagccccgcaagggtgctgacatcctcgtcgagtccctcgagcgctgcggcgtccgcgacgtcttcgcctaccccggcggcgcgtccatggagatccaccaggcactcacccgctcccccgtcatcgccaaccacctcttccgccacgagcaaggggaggcctttgccgcctccggctacgcgcgctcctcgggccgcgtcggcgtctgcatcgccacctccggccccggcgccaccaacctagtctccgcgctcgccgacgcgctgctcgattccgtccccatggtcgccatcacgggacaggtggcgcgacgcatgattggcaccgacgccttccaggagacgcccatcgtcgaggtcacccgctccatcaccaagcacaactacctggtcctcgacgtcgacgacatcccccgcgtcgtgcaggaggctttcttcctcgcctcctctggtcgaccagggccggtgcttgtcgacatccccaaggacatccagcagcagatggcggtgcctgtctgggacaagcccatgagtctgcctgggtacattgcgcgccttcccaagccccctgcgactgagttgcttgagcaggtgctgcgtcttgttggtgaatcgcggcgccctgttctttatgtgggcggtggctgcgcagcatctggtgaggagttgcgacgctttgtggagctgactggaatcccggtcacaactactcttatgggcctcggcaacttccccagcgacgacccactgtctctgcgcatgctaggtatgcatgggacggtgtatgcaaattatgcagtggataaggccgatctgttgcttgcacttggtgtgcggtttgatgatcgcgtgacagggaagattgaggcttttgcaagcagggctaagattgtgcacgttgatattgatccggctgagattggcaagaacaagcagccacatgtgtccatctgtgcagatgttaagcttgctttgcagggcatgaatgctcttcttgaaggaagcacatcaaagaagagctttgactttggctcatggaacgatgagttggatcagcagaagagggaattcccccttgggtataaaacatctaatgaggagatccagccacaatatgctattcaggttcttgatgagctgacgaaaggcgaggccatcatcggcacaggtgttgggcagcaccagatgtgggcggcacagtactacacttacaagcggccaaggcagtggttgtcttcagctggtcttggggctatgggatttggtttgccggctgctgctggtgcttctgtggcaaacccaggtgtcactgttgttgacatcgatggagatggtagctttctcatgaacgttcaggagctagctatgatccgaattgagaacctcccagtgaaggtctttgtgctaaacaaccagcacctggggatggtggtgcagttggaggacaggttctataaggccaacagagcgcacacatacttgggaaacccagagaatgaaagtgagatatatccagatttcgtgacgatcgccaaagggttcaacattccagcggtccgtgtgacaaagaagaacgaagtccgcgcagcgataaagaagatgctcgagactccagggccgtacctcttggatataatcgtcccacaccaggagcatgtgttgcctatgatccctagtggtggggctttcaaggatatgatcctggatggtgatggcaggactgtgtactgactagctagtcagttaacagatcctctagtgccgtgggtcgtttaagctgccgctgtacctgtgtcgtctggtgccttctggtgtacctgggaggttgtcgtctatcaagtatctgtggttggtgtcatgagtcagtgagtcccaatactgttcgtgtcctgtgtgcattatacccaaaactgttatgggcaaatcatgaataagcttgatgttcgaacttaaaagtctctgctcaatatggtattatggttgtttttgttcgtctcctaatatttgcctgggatcaaattttattggctggtgttcatttgacctccatgttcttgctaggctccattttttactctacagccataatatgtttgattgtttggtttgttctttgttgtacacctggttctgtcgagcttagttttcgacactggcttacagcttaacatgttgctattttattgggttctgattgctattttattgggttctgattgctagtttttgctgaatccaaaaaccatgttatttatttaagcgatccaggttattattatgatggtggctaagtttttttttttccaagggtaaattttctggattctccagtgtttctgtggccgaattcaatcactagagtcgacctgcaggccggtccgggcctagaaggcccgcgccacttacgcttgattccgatgacttcgtaggttcctagctcaagccgctcgtgtccaagcgtcacttacgattagctaatgattacggcatctaggaccgactagttcttatgtgcttctagtctccaaatgtggttgatagttattttgctctaagatcaacagtaatgaagtataaatcatcgttgtggtgtgctactcggttaattgagcattaacacacacaaacatgacgaggatggtataatctccaaaaatgtgtactttgttaggtgggaccctatagccttgattaatgtgctatgttaggcatgcctggaaacgtgtgacgcatatgttttgtgaacctgttgatattatatgtgcttttatattaccatattttattaaaatactaatatttattactagtaagatataacattctatctagcttaaaaactaaccataaatattccataataactagatttaccaaactaatatactaaatatacataataaatacaaaattaacaagacaataatcaatatttatgagcttaatatatttagacattatggttggtcgacgataatcatgctaacttttcgtaattgcttgattgaaatatgcttagaataatgcctctttgttctacatggcaaatagggaccattatggtgtaacaccctgggaaccacaaacaccccgaaatgctactaaactacacaactaaccttcatatataaaatttcgacagcatctcctttgaaaatttgcatagacgtggaagcaacagagtataaacagatctgcgtttaaacgtgcaagcgctactagacaattcagtacattaaaaacgtccgcaatgtgttattaagttgtctaagcgtcaatttgtttacaccacaatatatcctgcca

SEQ ID NO: 285 - DNA, 20224 bp, synthetic construct
  misc_feature 1..20224: note = PHP101270
  source 1..20224: mol_type = other DNA
gtttacccgccaatatatcctgtcaaacactgcggccgcacttgaccgcggatggagccggagctgtggtgaggccatcgacgggaggtgggggagaacacagtctcagtgttctttgtgagtccgcaaggtttttagcttttctgtattaattaaggttgctgttggctgtagaatacggtcgtggaagagctgtatcggtagctactacgtaagctattatatactggaagtctggagctcgtcgatctccggtcgtcttcctccatttctcctcgtcttgctttgactgctgctaccatttgcttctgttttctgatgaagcatgccatgtcggccaccagtgtttgtgtggtttttgcagggaatggctttcaagtgctgtgattgaatggccctcgtcgtcctcggctgagctcacatggacgcgtcatgtgagtgagatatatgatcatatgatgagtggggttcgggtgagtgcgtacttgaagtaggatcccgctttcactcattcattcattggcctttaaaccgggaaattttcgcgaggagatggagggaagcaagcagggtgacgagtgcagagtgccgcgagcgctttgtcaaaaggcaccgccgtaggcaaaaaaatcaatggccctgactgactcgatggtagtactactgtagagactagagagggttgctccccatatcttcgtgtgacttttactccagcattgcatttccgtcattgagacgttaattaatagcagctttcgggacagatgactgtggccatgtttcgtcacggccgcttcgtgccagctgggggtactatagtactgtgattttgttagtaaaaactttcattaggccaccattgacgaccgggccttcgcttttgctgcgctaattaaccatttcccggcgaccgaagggaacatgaacatgccccgacacatgagggcatgaggactagtgttctccctgtcgttcgttgacttgactagtgatagtttaaacgctcttcaactggaagagcggttactaccggttcactagctagctgctaatcgagctagttaccctatgaggtgacatgaagcgctcacggttactatgacggttagcttcacgactgttggtggcagtagcgtacgacttagctatagttccggacttacccttaagataacttcgtatagcatacattatacgaagttatgggcccacgcgtgaagagcggttaccagagctggtcacctttgtccaccaagatggaactgtcttcggccagaatggccatctggattcagcaggcctagaaggccatttatcgctatcaactttgtatagaaaagttgggccgaattcgagctcggtacggccagaatggcccggaccgaagcttgcggccgcacactgatagtttaaactgaaggcgggaaacgacaatctgatcatgagcggagaattaagggagtcacgttatgacccccgccgatgacgcgggacaagccgttttacgtttggaactgacagaaccgcaacgttgaaggagccactcagccgcgggtttctggagtttaatgagctaagcacatacgtcagaaaccattattgcgcgttcaaaagtcgcctaaggtcactatcagctagcaaatatttcttgtcaaaaatgctccactgacgttccataaattcccctcggtatccaattagagtctcatattcactctcccgggggatctcgactctagaggatcgctcaggaaggccgctgagatagaggcatggcggccaatgcgggcggcggtggagcgggaggaggcagcggcagcggcagcgtggctgcgccggcggtgtgccgccccagcggctcgcggtggacgccgacgccggagcagatcaggatgctgaaggagctctactacggctgcggcatccggtcgcccagctcggagcagatccagcgcatcaccgccatgctgcggcagcacggcaagatcgagggcaagaacgtcttctactggttccagaaccacaaggcccgcgagcgccagaagcgccgcctcaccagcctcgacgtcaacgtgcccgccgccggcgcggccgacgccaccaccagccaactcggcgtcctctcgctgtcgtcgccgccgccttcaggcgcggcgcctccctcgcccaccctcggcttctacgccgccggcaatggcggcggatcggctgtgctgctggacacgagttccgactggggcagcagcggcgctgccatggccaccgagacatgcttcctgcaggactacatgggcgtgacggacacgggcagctcgtcgcagtggccacgcttctcgtcgtcggacacgataatggcggcggccgcggcgcgggcggcgacgacgcgggcgcccgagacgctccctctcttcccgacctgcggcgacgacggcggcagcggtagcagcagctacttgccgttctggggtgccgcgtccacaactgccggcgccacttcttccgttgcgatccagcagcaacaccagctgcaggagcagtacagcttttacagcaacagcaacagcacccagctggccggcaccggcaaccaagacgtatcggcaacagcagcagcagccgccgccctggagctgagcctcagctcatggtgctccccttaccctgctgcagggagtatgtgagagcaacgcgagctgccactgctcttcactgatgtctctggaatggaaggaggaggaagtgagcatagcgttggtgcgttgctgtcaagggcgaattcacatggttaaccgacaaagcagcattagtccgttgatcggtggaagaccactcgtcagtgttgagttgaatgtttgatcaataaaatacggcaatgctgtaagggttgttttttatgccattgataatacactgtactgttcagttgttgaactctatttcttagccatgccaagtgcttttcttattttgaataacattacagcaaaaagttgaaagacaaaaaaaaaaacccccgaacagagtgctttgggtcccaagcttctttagactgtgttcggcgttccccctaaatttctccccctatatctcactcacttgtcacatcagcgttctctttccccctatatctccacgctctacagcagttccacctatatcaaacctctataccccaccacaacaatattatatactttcatcttcaactaactcatgtaccttccaatttttttctactaataattatttacgtgcacagaaacttagcaaggagagagagagcgggaatgcggccgccaccgcggtggagctcgaattccggtccgggcctagaaggccagcttcaagtttgtacaaaaaagcaggctccggccagaatggcccggaccgggttaccgaattcgagctcggtaccatcggaagttgaagacaaagaaggtcttaaatcctggctagcaacactgaactatgccagaaaccacatcaaagcatatcggcaagcttcttggcccattatatccaaagacctcagagaaaggtgagcgaaggctcaattcagaagattggaagctgatcaataggatcaagacaatggtgagaacgcttccaaatctcactattccaccagaagatgcatacattatcattgaaacagatgcatgtgcaactggatggggagcagtatgcaagtggaagaaaaacaaggcagacccaagaaatacagagcaaatctgtaggtatgccagtggaaaatttgataagccaaaaggaacctgtgatgcagaaatctatggggttatgaatggcttagaaaagatgagattgttctacttggacaaaagagagatcacagtcagaactgacagtagtgcaatcgaaaggttctacaacaagagtgctgaacacaagccttctgagatcagatggatcaggttcatggactacatcactggtgcaggaccagagatagtcattgaacacataaaagggaagaggaatggtttagctgacatcttgtccaggctcaaagccaaattagctcagaatgaaccaacggaagagatgatcctgcttacacaagccataagggaagtaattccttatccagatcatccatacactgagcaactcagagaatggggaaacaaaattctcgatccattccccacattcaagaaggacatgttcgaaagaacagagcaagcttttatgctaacagaggaaccagttctactctgtgcatgcaggaagcctgcaattcagttagtgtccagaacatctgccaacccaggaaggaaattcttcaagtgcgcaatgaacaaatgccattgctggtactgggcagatctcattgaagaacacattcaagacagaattgatgaatttctcaagaatcttgaagttctgaagaccggtggcgtgcaaacaatggaggaggaacttatgaaggaagtcaccaagctgaagatagaagaggaggagttcgaggaataccaggccacaccaagggctatgtcgccagtagccgcagaagatgtgctagatctccaagacgtaagcaatgacgattgaggaggcattgacgtcagggatgaccgcagcggagagtactgggcccattcagtggatgctccactgagttgtattattgtgtgcttttcggacaagtgtgctgtccactttcttttggcacctgtgccactttattccttgtctgccacgatgcctttgcttagcttgtaagcaaggatcgcagtgcgtgtgtgacaccaccccccttccgacgctctgcctatataaggcaccgtctgtaagctcttacgatcatcggtagttcaccaaggatcggtagttcaccacatgagtatttgagtcaagtttggcttgaataataagaattacacctttccgcaggatccatggccactgtgaacaactggctcgctttctccctctccccgcaggagctgccgccctcccagacgacggactccacactcatctcggccgccaccgccgaccatgtctccggcgatgtctgcttcaacatcccccaagattggagcatgaggggatcagagctttcggcgctcgtcgcggagccgaagctggaggacttcctcggcggcatctccttctccgagcagcatcacaaggccaactgcaacatgatacccagcactagcagcacagtttgctacgcgagctcaggtgctagcaccggctaccatcaccagctgtaccaccagcccaccagctcagcgctccacttcgcggactccgtaatggtggcttcctcggccggtgtccacgacggcggtgccatgctcagcgcggccgccgctaacggtgtcgctggcgctgccagtgccaacggcggcggcatcgggctgtccatgattaagaactggctgcggagccaaccggcgcccatgcagccgagggtggcggcggctgagggcgcgcaggggctctctttgtccatgaacatggcggggacgacccaaggcgctgctggcatgccacttctcgctggagagcgcgcacgggcgcccgagagtgtatcgacgtcagcacagggtggagccgtcgtcgtcacggcgccgaaggaggatagcggtggcagcggtgttgccggcgctctagtagccgtgagcacggacacgggtggcagcggcggcgcgtcggctgacaacacggcaaggaagacggtggacacgttcgggcagcgcacgtcgatttaccgtggcgtgacaaggcatagatggactgggagatatgaggcacatctttgggataacagttgcagaagggaagggcaaactcgtaagggtcgtcaagtctatttaggtggctatgataaagaggagaaagctgctagggcttatgatcttgctgctctgaagtactggggtgccacaacaacaacaaattttccagtgagtaactacgaaaaggagctcgaggacatgaagcacatgacaaggcaggagtttgtagcgtctctgagaaggaagagcagtggtttctccagaggtgcatccatttacaggggagtgactaggcatcaccaacatggaagatggcaagcacggattggacgagttgcagggaacaaggatctttacttgggcaccttcagcacccaggaggaggcagcggaggcgtacgacatcgcggcgatcaagttccgcggcctcaacgccgtcaccaacttcgacatgagccgctacgacgtgaagagcatcctggacagcagcgccctccccatcggcagcgccgccaagcgcctcaaggaggccgaggccgcagcgtccgcgcagcaccaccacgccggcgtggtgagctacgacgtcggccgcatcgcctcgcagctcggcgacggcggagccctggcggcggcgtacggcgcgcactaccacggcgccgcctggccgaccatcgcgttccagccgggcgccgccagcacaggcctgtaccacccgtacgcgcagcagccaatgcgcggcggcgggtggtgcaagcaggagcaggaccacgcggtgatcgcggccgcgcacagcctgcaggacctccaccacctgaacctgggcgcggccggcgcgcacgactttttctcggcagggcagcaggccgccgccgctgcgatgcacggcctgggtagcatcgacagtgcgtcgctcgagcacagcaccggctccaactccgtcgtctacaacggcggggtcggcgacagcaacggcgccagcgccgtcggcggcagtggcggtggctacatgatgccgatgagcgctgccggagcaaccactacatcggcaatggtgagccacgagcaggtgcatgcacgggcctacgacgaagccaagcaggctgctcagatggggtacgagagctacctggtgaacgcggagaacaatggtggcggaaggatgtctgcatgggggactgtcgtgtctgcagccgcggcggcagcagcaagcagcaacgacaacatggccgccgacgtcgggcatggcggcgcgcagctcttcagtgtctggaacgacacttaagcgtacgtgccggcctggctctccgaaagggcgtattccagcacactggcggccgttactagacccaacctagacttgtccatcttctggattggccaacttaattaatgtatgaaataaaaggatgcacacatagtgacatgctaatcactataatgtgggcatcaaagttgtgtgttatgtgtaattactagttatctgaataaaagagaaagagatcatccatatttcttatcctaaatgaatgtcacgtgtctttataattctttgatgaaccagatgcatttcattaaccaaatccatatacatataaatattaatcatatataattaatatcaattgggttagcaaaacaaatctagtctaggtgtgttttgcgaatgcggcctccgggcacccagctttcttgtacaaagtggccgttaacggatcggccagaatggcccggaccgggttaccccgcggttcaaagccaatgactgttgttaggtccagtttctaaggacgaatcatccaatcactggttctttctgaacaaaacaaagagctatagagttacgttactgtagccgagacagagcctgcaatctggttatgccacatactaggttctttcttaaagttgactcactctatcctaagttctacttacaaggagctacaacaaattggtcataaccggagagcgttcaaggaggtaatatcccatcttactctgtagcaaggctacaaaaggagagctaaagaactaggctacaaaaagagagctaaagaactaactatctagcaagactacagagctatagtgtagagatttcataaccggtgagcgttcaaggatactttgaagagaagaggtaatatctcaactagcaagactacaaaaaaatggagatataaaactaactgtctaacaagactacagagctatagtagagatagatacgttcgacacttaagcatgagaattcgagctcggtaccctggttcacaaactcaatacaacacacagtggagtagggtattacgctccggcggcccgaaccactctaaatccttgtgtcctcgtgtgctcttccaccattaatgactgtaattgcagggacacgaagagttgtagcgcttttgccaacaagatccgctatatgctagtagagtggaacctgcacagcaacaagcatccaataatctgagaataagaattatgtgtggtgatggttctcatctctgcaactcgccattttcgcgagagaaccaaatccaagttggtgaagatcatgatttgggctcatgggctggcatagtagctattacctttgcaattgtggttcgaatctatccgatattctccttttcagggagagctaatgcttatgcttattgggtattttggtttgacactgcttcacgcccaaaaaaaggcaactatgtctgagttggatatggcccaaaaaaaggcagctatgtctgagttggatatggaagtcttctttcgtttagggtgaagtaagaccaagctcatgagcttattatcttaggtcggaacaaattagttgataggcatggcacatttatcaaattataatgattttaacagaaaagcaacacctctttttcagcagcaccagctttgcaagctgcaattgacactccaagcatagtatttgctccaaactcagcctgcatttcgcacaatatcatatctatttccatttggataaaatatattttccagaaatatgggaacagaatcaagatacagaaaaaagttgtggtagtagtggtaagtggaaacacaagtacagtgaaaagatagcattatttctgaacagtcaaattaaccgaaataagtagtatcacatactgcccctaaattgactacacccaatgtaaagaattgcttgagcatattgagccatcagttgtttgtttgtgtaacggatttgacaatgcagagttcaggagcaaaaaaccgcaaaggagagaaagagggaaaggatctcctagtatcccaccttgtggcgcgccctgtcaagtgcatgatggcctggtcgatctgcgtctgctgctgcggttccatcccaacgagtgcctccgacaccttgtcgttgatcacccgcaccgcgtaggcgacccccctggcgaggaacttccgcctctcggaggccccggccgcgtcggcggcggcgccctcgagcgcgcccacgctagccgtagatgctcggtgcacggccttgttggtgtgcaactcgacctcaacggccggtgcgctacgcccgtcaaggatctggcgcgcccgcaccctcgtgatcacggtgggcgcctcccgcctcatgtggccgacgatgaaaagcgccgggttaggggccttggcgcgcaccgccgtattcagggcctcctcgctcttgcgcgagagcaggtgcttccccaggtactcctgcactgacaaggctgccacagcggtggaatttgtcctcacgacttcgccacgtcgtcctcacctccctggcttcccacgactccgccgtatcgaggtgctcggtgggtcgtcttaatccgaagtccgaactaggaagacgagacagagaggtctgaggaatgggcctcgtttgatgttgagctgaattatttttccagcataagcccaggtcttggtccatgaacaaaattactagaaacccagcccagtactacgatctaaaagagggactgccactggatagctctctctagcattctccacgctccaatacagcggcgtcgtgtctatccgggtctatccgcgaacacgtgagaactctccagaaactgctttctcctccacttcatctctctcgctttccctctataaaaagaccccttctaggaattgagggagacagcaagcaccaagcagcgatccgaagctcaatcaattcactcaaacctcttccccaaatcttcgattagatcttcgttgacaagaagactagaaccgaacctgacatgtccaacctgctcacggttcaccagaaccttccggctcttccagtggacgcgacgtccgatgaagtcaggaagaacctcatggacatgttccgcgacaggcaagcgttcagcgagcacacctggaagatgctgctctccgtctgccgctcctgggctgcatggtgcaagctgaacaacaggaagtggttccccgctgagcccgaggacgtgagggattaccttctgtacctgcaagcgcgaggtttgtttctgcttctacctttgatatatatataataattatcattaattagtagtaatataatatttcaaatatttttttcaaaataaaagaatgtagtatatagcaattgcttttctgtagtttataagtgtgtatattttaatttataacttttctaatatatgaccaaaacatggtgatgcctaggtctggcagtgaagaccatccagcaacaccttggacaactgaacatgcttcacaggcgctccggcctcccgcgccccagcgactcgaacgccgtgagcctcgtcatgcgccgcatcaggaaggaaaacgtcgatgccggcgaaagggcaaagcaggccctcgcgttcgagaggaccgatttcgaccaggtccgcagcctgatggagaacagcgacaggtgccaggacattaggaacctggcgttcctcggaattgcatacaacacgctcctcaggatcgcggaaattgcccgcattcgcgtgaaggacattagccgcaccgacggcggcaggatgcttatccacattggcaggaccaagacgctcgtttccaccgcaggcgtcgaaaaggccctcagcctcggagtgaccaagctcgtcgaacgctggatctccgtgtccggcgtcgcggacgacccaaacaactacctcttctgccgcgtccgcaagaacggggtggctgcccctagcgccaccagccaactcagcacgagggccttggaaggtattttcgaggccacccaccgcctgatctacggcgcgaaggatgacagcggtcaacgctacctcgcatggtccgggcactccgcccgcgttggagctgctagggacatggcccgcgccggtgtttccatccccgaaatcatgcaggcgggtggatggacgaacgtgaacattgtcatgaactacattcgcaaccttgacagcgagacgggcgcaatggttcgcctcctggaagatggtgactgaggtacccaacctagacttgtccatcttctggattggccaacttaattaatgtatgaaataaaaggatgcacacatagtgacatgctaatcactataatgtgggcatcaaagttgtgtgttatgtgtaattactagttatctgaataaaagagaaagagatcatccatatttcttatcctaaatgaatgtcacgtgtctttataattctttgatgaaccagatgcatttcattaaccaaatccatatacatataaatattaatcatatataattaatatcaattgggttagcaaaacaaatctagtctaggtgtgttttgcgatccgatatcgaattggccacggtaccagctgctgctgttctagggttcacaagtctgcctatttgtcttccccaatggagctatggttgtctggtctggtccttggtcgtgtcccgtttcattgtgtactatttacctgtaatgtgtatccttaagtctggtttgatggtgtctgaaacgttttgctgtggtagagcagcatggaagaactataatgaataagtgatccctaatcattgtgtccaaattttgcttctgctatacccttttgtgctgtttcttatgttttgcttaaaaatttgatctgacaaacaaatttgtctaaattatgctcttgttctgactgtgtactgtacacatttgtattgctaccggtttggcacatagttttctctttgattgcagatcaaacccttctgattgcagattgcttggctatggctgatgtgctcactgttcttctttagcttgtatattgctgatggtggcttggctacggctgaaaaagttgctgctgcgccgacttggcaactgttgctccagtaatgctttgtcctctcttcctagccgccgacttggcacttggcagctgttgctcctgtaatgcgttgttatctcttatctcttgagatgtactatgattttgaggctgtttgacttgtgccagattgccagtgctgatgctatattatctcaggtttttatgctagtatatgttttactgtgtgctgcctgtgtcgagttacgtaatctattgaaccgctatgcgtgttgatgccctgttgttgcttgccagattgatgcccctgttgcttgcagcttgcaagctgtagtgaaatcctaaaattccaaaccaaatctattctgaacttttgaagatctgtgatgtccggaagaaaagattcaaacagataaacgggactctccagaatctataaaataaatgatcgacaaacgctttgctttggtaggcttcaagcttggtcacccggtccgggcctagaaggccagcttcggccgccccgggcaactttattatacaaagttgatagataaatcagatatctggttcctaaggacccggcggaccgattaaactgattcggtccgacgcgttacctaataacttcgtatagcatacattatacgaagttattagctaactaactagtaagcttaagccatgggtcgacggatccgttaactagcgtggcatttggcaccgccgcacactatgcgagctaggagtgctagtttacagatgaaactatgaaaccaagaaaacacaattgtccgtagctagcgcgtggcgtcgtgtcaagcttcacacagtatcttcgttcttcactataaatcgcgcctgttgttcgtgagacccaccaccgtggataacagtcccctaataataagcgatcaacagcactgctgatggctgaacaccgaggcgccgccgcgcgtaaccatccgccggagcagcccgtcgtgccggcgaacgacgccttccccgaccgcgcccagcagctctgcctcgacgccgggcgcgcgctcgcgatgtgcggcgtgctcgtcgccgtccctcccgcattttacgcgtcgacgtcgcggacgacaccgcacttgccttcgtcggcttcgtcctctggatcatcggtgcgtggctgtgcctcctggcgctcacgcccttggctccacgggcggtgagggcgggcggggccgccgccagcaccttgctgatcaggtgcctgtccctttcatgaactactagcgcccgcgcccgcggccgccgggcacaagagaacacatcgatgttcgctgcgtacgtcagcaataaggcactctttgtcagtagtcgagtgcatatgttgggtgtttgccctgggagatttcaagtgttgtggccattatcccgcaggataaaaaatcggcggcttttggattgatacggaaaataacgatgtttcatgctcgtgttgtgtgtgtgacatcttgtcagccaagtttttaaccgttgctactccccctctgtgggctcagtgtgtggaccggaatacgtcgtacataggccgtagcctaagcccaatatgccgtttttcaggttggcctgtgtgacgacaagcgggtctcaaaagcccatcacgcaactggcctgcaattattggaggagagcgcgtcgagttggttccagaggctgcgtggtggggccggactctgcgacgacctctcgttcgcgtccgatttggttgccgtgagccgtgacgtaacgcctccttccgttcctccctatataagttccacccccgggtccggtttccccaagccccagtgacccccgatcccgatcgcgaaatctccgcacccgccggcaagggaccgaagcaagcctctctcccgaccgtcgcatcaaggtacgcgtccgctcgatctgtcctcttccttctcgatttgacttgctgtggtgcccgatcacgggatcagaatcgcaccagtgtagatttcgcatgttctaagatgtgttagtttccaggctaatccagttctcttgacgcccgatccgatcgagctccgtgtttatttcagcctaatcgtagtattcccctaaaatttcctcattagggggttcgcaagattgttggtcgacaggttcacttatgctcgatcgcttacttttagtcgattcatgctgcgtactattgttgccccccgtggttttatcttttctcgtgtgaaatccagtagatatagtagatatcgtagcattaggttttaattcaatcgattgattattgtatcatcaaaattgagaagttcgaatcatgcctatcatgctgcctcaaccgaaatcctgtatattgaagtttcaattcaattgattgatcattcattagattcaaccaaaatctagaaggttagatgacgcatgtcatgctgcctgcgtagtttacctttgatctgtttatgattaccttatcagtaggatatttgtgattttgggaagtagcactaactgattcatgctgacatgatgttccctttcagattatactgttgagtcctatctaattgatgctttgtatgctatatgaatacgtcatggtaaattagcagttaattagcatattagcaattgggcgtacctcatcaggattgctcttgtagatgtgtgtggtgatgtttcttgttcaattcatgttctgctttaaaagtatgtgttctctgtttgttaattaagattcatggttataatgatttggacctaattaatcagggttgcccttttagatgcgtggttacttgttgagttcatttttttcctgctatagttgtatgcgtttgttcattcatggttagatttgatttgtttcttctctattccatgccttccatatacttcaattgtagcttaacatgagatttctgtatatgcaggtcgaccgccggggatccacacgacaccatggcccagtccaagcacggcctgaccaaggagatgaccatgaagtaccgcatggagggctgcgtggacggccacaagttcgtgatcaccggcgagggcatcggctaccccttcaagggcaagcaggccatcaacctgtgcgtggtggagggcggccccttgcccttcgccgaggacatcttgtccgccgccttcatgtacggcaaccgcgtgttcaccgagtacccccaggacatcgtcgactacttcaagaactcctgccccgccggctacacctgggaccgctccttcctgttcgaggacggcgccgtgtgcatctgcaacgccgacatcaccgtgagcgtggaggagaactgcatgtaccacgagtccaagttctacggcgtgaacttccccgccgacggccccgtgatgaagaagatgaccgacaactgggagccctcctgcgagaagatcatccccgtgcccaagcagggcatcttgaagggcgacgtgagcatgtacctgctgctgaaggacggtggccgcttgcgctgccagttcgacaccgtgtacaaggccaagtccgtgccccgcaagatgcccgactggcacttcatccagcacaagctgacccgcgaggaccgcagcgacgccaagaaccagaagtggcacctgaccgagcacgccatcgcctccggctccgccttgccctccggactcagatctcgatagagtcaacctagacttgtccatcttctggattggccaacttaattaatgtatgaaataaaaggatgcacacatagtgacatgctaatcactataatgtgggcatcaaagttgtgtgttatgtgtaattactagttatctgaataaaagagaaagagatcatccatatttcttatcctaaatgaatgtcacgtgtctttataattctttgatgaaccagatgcatttcattaaccaaatccatatacatataaatattaatcatatataattaatatcaattgggttagcaaaacaaatctagtctaggtgtgttttgcgaattgcggcgcccttactttaacgcctctaaccaacacccctttatctttataaggaacaataaacagaatttgccccactgttctaaatcacctaataatatccccagctaaaaacaataaaggtttcctagaattaagacaagcatgactgttcctccaggagggtttggaacattgttgcagtcttgcagatacgggcgaagggtgagaaacagagcggagggctggaggtgacctcggtagtcgacgccggagttgagcttgacaacgacggggcggcccctgatggacttgaggaagtccgatggcgtcttcaccgtcccgccggcgcccgaggcgggcctgtcgctgccgccgccgccgctgctcatcttgcgcgctgtgcccccggcggtgtccctgtgttgcggatcgcgggtgggccaggtggatgcgagggcgacccgtttggactccggccggagccgccggatccctggtcggtgtcagtgccgtttactctgggccccacgtgtcagtaccgtctgtagatgacaacaacccgtcgtccacagtcatgtccaaaatatcctttcttcttttttttcgattcggatatctatcttccttttttttttccaaaaatcttcttgacgcaccagcgcgcacgtttgtggtaaacgccgacacgtcggtcccacgtcgatagaccccacccaccagtgagtagcgtgtacgtattcgggggtgacggacgtgtcgccgtcgtcttgctagtcccattcccatctgagccacacatctctgaacaaaaaaaaggagggaggcctccacgcacatccccctccgtgccacccgccccaaaccctcgcgccgcctccgagacagccgccgcaaccatggccaccgccgccgccgcgtctaccgcgctcactggcgccactaccgctgcgcccaaggcgaggcgccgggcgcacctcctggccacccgccgcgccctcgccgcgcccatcaggtgctcagcggcgtcacccgccatgccgatggctcccccggccaccccgctccggccgtggggccccaccgagccccgcaagggtgctgacatcctcgtcgagtccctcgagcgctgcggcgtccgcgacgtcttcgcctaccccggcggcgcgtccatggagatccaccaggcactcacccgctcccccgtcatcgccaaccacctcttccgccacgagcaaggggaggcctttgccgcctccggctacgcgcgctcctcgggccgcgtcggcgtctgcatcgccacctccggccccggcgccaccaacctagtctccgcgctcgccgacgcgctgctcgattccgtccccatggtcgccatcacgggacaggtggcgcgacgcatgattggcaccgacgccttccaggagacgcccatcgtcgaggtcacccgctccatcaccaagcacaactacctggtcctcgacgtcgacgacatcccccgcgtcgtgcaggaggctttcttcctcgcctcctctggtcgaccagggccggtgcttgtcgacatccccaaggacatccagcagcagatggcggtgcctgtctgggacaagcccatgagtctgcctgggtacattgcgcgccttcccaagccccctgcgactgagttgcttgagcaggtgctgcgtcttgttggtgaatcgcggcgccctgttctttatgtgggcggtggctgcgcagcatctggtgaggagttgcgacgctttgtggagctgactggaatcccggtcacaactactcttatgggcctcggcaacttccccagcgacgacccactgtctctgcgcatgctaggtatgcatgggacggtgtatgcaaattatgcagtggataaggccgatctgttgcttgcacttggtgtgcggtttgatgatcgcgtgacagggaagattgaggcttttgcaagcagggctaagattgtgcacgttgatattgatccggctgagattggcaagaacaagcagccacatgtgtccatctgtgcagatgttaagcttgctttgcagggcatgaatgctcttcttgaaggaagcacatcaaagaagagctttgactttggctcatggaacgatgagttggatcagcagaagagggaattcccccttgggtataaaacatctaatgaggagatccagccacaatatgctattcaggttcttgatgagctgacgaaaggcgaggccatcatcggcacaggtgttgggcagcaccagatgtgggcggcacagtactacacttacaagcggccaaggcagtggttgtcttcagctggtcttggggctatgggatttggtttgccggctgctgctggtgcttctgtggcaaacccaggtgtcactgttgttgacatcgatggagatggtagctttctcatgaacgttcaggagctagctatgatccgaattgagaacctcccagtgaaggtctttgtgctaaacaaccagcacctggggatggtggtgcagttggaggacaggttctataaggccaacagagcgcacacatacttgggaaacccagagaatgaaagtgagatatatccagatttcgtgacgatcgccaaagggttcaacattccagcggtccgtgtgacaaagaagaacgaagtccgcgcagcgataaagaagatgctcgagactccagggccgtacctcttggatataatcgtcccacaccaggagcatgtgttgcctatgatccctagtggtggggctttcaaggatatgatcctggatggtgatggcaggactgtgtactgactagctagtcagttaacagatctgccagatcctcggtgtacaaataacccgtcttatcctatgagacgggccggcgtcagtgtgttctggaggaatttttatgtcagagcctttttctttgtgtgcttgatgtagatgccaagggaagcttattggctgttgaagcttgatgcaaaataaattatggaactctgttttttgtttatctaataataactagcaaatatgcttccattgcattgaaactaacagccttttgtgtttccaagttttattttgtgacaatgtcatctatttcaattagttgtggaatcggaaacttgcaggactaacttggaaactccaatccctcagcatcctggactttttcctggtgtaatccatgtagatattattttaatcatcattttagttctggaggtttttccatctccggttttgctcccctttcttcaaaaaaaaaaaaaaaatgccgtaggcgccgcaacgcccacctgttgttcaaactcatgggcacgagtggctcgaagattttatacaacaattgctgtagtttcaccgttgctggtgaagaagcatttttttaaaaaaatatagtggtattcattttaattagtttagttgtgcagcgagcaaaatttggacatgctctgctcggaatctgatcgacctagacacagattagcagcagtagctttgtcatctgttccaagagttgcgatctgatagaagaaaaaaaaaccttcccttcaatgtaaaaccgaaactaacaagaaagaagcacagtgccgtttaggcaagtatggagtacgtattaagcatgtagaaggccatgcatgaaccactaacaagaaagaagcgcagtgccattcaggcaagcataagcatgtagattggcatgcatgaacaactaacagtagatcgtctctggtctgattagaagttttttgggaagccaagaaatcatgtacaactggttccatctcaaattccgtggcaaaaagaggcctaagcaacatacctcgagtagatcacattcaagcttggtcacccggtccgtcaatattctgattccgatgacttcgtaggttcctagctcaagccgctcgtgtccaagcgtcacttacgattagctaatgattacggcatctaggaccgactagtggcgcgccgactagctagctaaggtaccgagctcgaattcattccgattaatcgtggcctcttgctcttcaggatgaagagctatgtttaaacgtgcaagcgctactagacaattcagtacattaaaaacgtccgcaatgtgttattaagttgtctaagcgtcaatttgtttacaccacaatatatcctgcca

SEQ ID NO: 286 - DNA, 23095 bp, synthetic construct
  misc_feature 1..23095: note = PHP102481
  source 1..23095: mol_type = other DNA
gtttacccgccaatatatcctgtcaaacactgcggccgcacttgaccgcggatggagccggagctgtggtgaggccatcgacgggaggtgggggagaacacagtctcagtgttctttgtgagtccgcaaggtttttagcttttctgtattaattaaggttgctgttggctgtagaatacggtcgtggaagagctgtatcggtagctactacgtaagctattatatactggaagtctggagctcgtcgatctccggtcgtcttcctccatttctcctcgtcttgctttgactgctgctaccatttgcttctgttttctgatgaagcatgccatgtcggccaccagtgtttgtgtggtttttgcagggaatggctttcaagtgctgtgattgaatggccctcgtcgtcctcggctgagctcacatggacgcgtcatgtgagtgagatatatgatcatatgatgagtggggttcgggtgagtgcgtacttgaagtaggatcccgctttcactcattcattcattggcctttaaaccgggaaattttcgcgaggagatggagggaagcaagcagggtgacgagtgcagagtgccgcgagcgctttgtcaaaaggcaccgccgtaggcaaaaaaatcaatggccctgactgactcgatggtagtactactgtagagactagagagggttgctccccatatcttcgtgtgacttttactccagcattgcatttccgtcattgagacgttaattaatagcagctttcgggacagatgactgtggccatgtttcgtcacggccgcttcgtgccagctgggggtactatagtactgtgattttgttagtaaaaactttcattaggccaccattgacgaccgggccttcgcttttgctgcgctaattaaccatttcccggcgaccgaagggaacatgaacatgccccgacacatgagggcatgaggactagtgttctccctgtcgttcgttgacttgactagtgatagtttaaacgctcttcaactggaagagcggttactaccggttcactagctagctgctaatcgagctagttaccctatgaggtgacatgaagcgctcacggttactatgacggttagcttcacgactgttggtggcagtagcgtacgacttagctatagttccggacttacccttaagataacttcgtatagcatacattatacgaagttatgggcccacgcgtgaagagcggttaccagagctggtcacctttgtccaccaagatggaactgtcttcggccagaatggccatctggattcagcaggcctagaaggccatttatcgctatcaactttgtatagaaaagttgggccgaattcgagctcggtacggccagaatggcccggaccgaagcttgcggccgcacactgatagtttaaactgaaggcgggaaacgacaatctgatcatgagcggagaattaagggagtcacgttatgacccccgccgatgacgcgggacaagccgttttacgtttggaactgacagaaccgcaacgttgaaggagccactcagccgcgggtttctggagtttaatgagctaagcacatacgtcagaaaccattattgcgcgttcaaaagtcgcctaaggtcactatcagctagcaaatatttcttgtcaaaaatgctccactgacgttccataaattcccctcggtatccaattagagtctcatattcactctcccgggggatctcgactctagaggatcgctcaggaaggccgctgagatagaggcatggcggccaatgcgggcggcggtggagcgggaggaggcagcggcagcggcagcgtggctgcgccggcggtgtgccgccccagcggctcgcggtggacgccgacgccggagcagatcaggatgctgaaggagctctactacggctgcggcatccggtcgcccagctcggagcagatccagcgcatcaccgccatgctgcggcagcacggcaagatcgagggcaagaacgtcttctactggttccagaaccacaaggcccgcgagcgccagaagcgccgcctcaccagcctcgacgtcaacgtgcccgccgccggcgcggccgacgccaccaccagccaactcggcgtcctctcgctgtcgtcgccgccgccttcaggcgcggcgcctccctcgcccaccctcggcttctacgccgccggcaatggcggcggatcggctgtgctgctggacacgagttccgactggggcagcagcggcgctgccatggccaccgagacatgcttcctgcaggactacatgggcgtgacggacacgggcagctcgtcgcagtggccacgcttctcgtcgtcggacacgataatggcggcggccgcggcgcgggcggcgacgacgcgggcgcccgagacgctccctctcttcccgacctgcggcgacgacggcggcagcggtagcagcagctacttgccgttctggggtgccgcgtccacaactgccggcgccacttcttccgttgcgatccagcagcaacaccagctgcaggagcagtacagcttttacagcaacagcaacagcacccagctggccggcaccggcaaccaagacgtatcggcaacagcagcagcagccgccgccctggagctgagcctcagctcatggtgctccccttaccctgctgcagggagtatgtgagagcaacgcgagctgccactgctcttcactgatgtctctggaatggaaggaggaggaagtgagcatagcgttggtgcgttgctgtcaagggcgaattcacatggttaaccgacaaagcagcattagtccgttgatcggtggaagaccactcgtcagtgttgagttgaatgtttgatcaataaaatacggcaatgctgtaagggttgttttttatgccattgataatacactgtactgttcagttgttgaactctatttcttagccatgccaagtgcttttcttattttgaataacattacagcaaaaagttgaaagacaaaaaaaaaaacccccgaacagagtgctttgggtcccaagcttctttagactgtgttcggcgttccccctaaatttctccccctatatctcactcacttgtcacatcagcgttctctttccccctatatctccacgctctacagcagttccacctatatcaaacctctataccccaccacaacaatattatatactttcatcttcaactaactcatgtaccttccaatttttttctactaataattatttacgtgcacagaaacttagcaaggagagagagagcgggaatgcggccgccaccgcggtggagctcgaattccggtccgggcctagaaggccagcttcaagtttgtacaaaaaagcaggctccggccagaatctcactgactagctaaccgcgtgcgccgtggaatccgcctggatcgctgggggcgtttccaactgatcccccgcggccttccgtcgaatccgcctggatcggccgccacttggcaggccgcgaaggatctcagcccaggaaaagcccacggctccaaggcgcaaatgaaagaggagaagagaaaatcgtgagaaaactcactggaggagaaaaatggctatagtaaaattagtgaaatacccaatccggaaaaaacgtctagtgcttcgcctacttcctcaaacaaaagagacgcgcgaagggcagagcctcagccacccagcagtaatagcagccgtggtgcccgttgagattccccgcgccgttccgtcgaatcgatcagccgcgcgcccggcgcccctgcacatatattatacccaatgcccacacctcacaaccacttgctaacgcgcgcggcggtgacctaggctgcggtggactggtcatcgctccccgccgacgtgttcctagccaccaccggtctcgactactacatgagcctccgcgccgcgtgccgcccctgccgcgccgccaccgcggacccgcgcggtccggaccggcgcttccatccccgccggtggatcatgctcgaactgaatatccatgtttcaagagatattgttaagtccaaagctttcaaactgaatatccatgtttcatcgaaatagggtacaaaactttcgagtttgtggatgttcaacccaaaatccataacatacaacggttcagcctatttcttgagttgacagttcgcaattcctagtggcaatgaatacatgctagctactcccctttaactaatgaatacttggctcgaaacctctcgaccattgagcttaatgagtccagccgagtttgattttgaactggtcaacgaaacatttgagtcaagccgagcataattctgagttcgttaataaaacaactttaaccactcaagcaacgagctactcgtttaacaccatcccctcttctccccttggtccttggtccatccctctttttgacctaactcaatatccacccacattccttgacacacaagcaaaaccactcttgactcgcgtcctcctctcatatggcatatatgttaatttattaacgatcgagttaaacaaaccaattttgtagttaaattgagtcgagcccatgtcgcttttgaacatgatatactattaacgagtcgagctaactgttgtaactagtgtgttatcttaattggttctaccaattcgagccaagctaactactccctccgttacataaagattggcacggatatccggctctactcacacggacatgtggtcataatgcaaaagatgcaaatgaacaattctgaacaggagatttgatatcagaacctttggttatgtggcatgtgcctttaaccgtgtggagctaacaatttaacttaatccgtattataatctcacgcacactgtgcttgattcttcttgctttgcttcccttggtgcgggtgcacatctcagagcatacggacggtatagaaagaaggtgcagtgcgtcccagactaaccaaactttttttttggctatacaaaatgcacggttgtttgttgcacgcaacgacgattgttccttttgccaaagtaaataaataagcatctctcgtcgaagatcattatttttctaattctctacctcgtgaaagctggaagtggccacgtcaccggcaaaactaaccaacggtaatatctcccggaaaaatccaccgagccagcccttcgctagcgccaaagaagttcaccgcgcgcacggccaaaatccacgcaagaccagcgaaatctcgtggtctccactctctgctcgcccggcgcggcgagaagataatctcatggccaccgcacggccacatcagcgagccaccgcagcatccccgtgaggacattgaccccaccccatcgccctcggctcagactcaaacccatcaaaaatccgcgcgcgcccacggtgccagccactccgtggccagagcgcggccacctcggcaacccccatccgccttcccggcacctcacagcgcgcgcgccaatggcgactcggcttaagattccccgtggataaggactcgaacgtaagcgcttacgacgtaagcgcttacgtcgcgcgcgttcgggcctcctatttaaacgcctctcgctcccgctttactccacagcaacaaccgctccaacacttcagttctcactccacagctcagagtcagagctactagcagaattcttgtaaggttcccttccctcctcccctcacacccctgttcgtgttccttcggatcggatctcagtggtgatgttagacgtccgcggctgcctacgtagtggcattgccgcccgaaaggtttgtttaggtggggtagatccgaaacaggccggatctggaccatgtccgcggcggggcggcgggacttgatcgcgtagctgtcgtgtgcatttctccctaccagtggcggaatcggcgatgtggacctaagggctaaggcttatctgctgccttgaccatttcgtcgctgacaaaaacaaagtgacaatcatgccgttctctgtttgtttatctggatcgttattacgctgtgaatcctgcgatatgtggctaagtgatttttcttctttttctgggggcagtttagcctttgacccagtcctaggtgtggtcactaggactgtgtagcatgatgagtgaggttgcagcaggctgattgctagtggacgtttttttccccaatttgttaggttttcacgctccaggttgtgcaagtaattttgctagtgattgtgtgatccatcttcaacgttgaaccttgtttttccccctaaaacccccaacaggaaatcttgccccgacttctattgcaaaaattgtaacgcttagcaccctgattgactcaattcctgtcactaggcatgctcggtcaaaagcagatgatttaccacttagaaactgccctgcccctgctttccacatagcatttcgaactttttgactactattgacacccccctaacttgccgaactatttctctcttcagctactatttacctagttataattacataaatgtttgtgtgtatcttgtgcagccatggccactgtgaacaactggctcgctttctccctctccccgcaggagctgccgccctcccagacgacggactccacactcatctcggccgccaccgccgaccatgtctccggcgatgtctgcttcaacatcccccaagattggagcatgaggggatcagagctttcggcgctcgtcgcggagccgaagctggaggacttcctcggcggcatctccttctccgagcagcatcacaaggccaactgcaacatgatacccagcactagcagcacagtttgctacgcgagctcaggtgctagcaccggctaccatcaccagctgtaccaccagcccaccagctcagcgctccacttcgcggactccgtaatggtggcttcctcggccggtgtccacgacggcggtgccatgctcagcgcggccgccgctaacggtgtcgctggcgctgccagtgccaacggcggcggcatcgggctgtccatgattaagaactggctgcggagccaaccggcgcccatgcagccgagggtggcggcggctgagggcgcgcaggggctctctttgtccatgaacatggcggggacgacccaaggcgctgctggcatgccacttctcgctggagagcgcgcacgggcgcccgagagtgtatcgacgtcagcacagggtggagccgtcgtcgtcacggcgccgaaggaggatagcggtggcagcggtgttgccggcgctctagtagccgtgagcacggacacgggtggcagcggcggcgcgtcggctgacaacacggcaaggaagacggtggacacgttcgggcagcgcacgtcgatttaccgtggcgtgacaaggcatagatggactgggagatatgaggcacatctttgggataacagttgcagaagggaagggcaaactcgtaagggtcgtcaagtctatttaggtggctatgataaagaggagaaagctgctagggcttatgatcttgctgctctgaagtactggggtgccacaacaacaacaaattttccagtgagtaactacgaaaaggagctcgaggacatgaagcacatgacaaggcaggagtttgtagcgtctctgagaaggaagagcagtggtttctccagaggtgcatccatttacaggggagtgactaggcatcaccaacatggaagatggcaagcacggattggacgagttgcagggaacaaggatctttacttgggcaccttcagcacccaggaggaggcagcggaggcgtacgacatcgcggcgatcaagttccgcggcctcaacgccgtcaccaacttcgacatgagccgctacgacgtgaagagcatcctggacagcagcgccctccccatcggcagcgccgccaagcgcctcaaggaggccgaggccgcagcgtccgcgcagcaccaccacgccggcgtggtgagctacgacgtcggccgcatcgcctcgcagctcggcgacggcggagccctggcggcggcgtacggcgcgcactaccacggcgccgcctggccgaccatcgcgttccagccgggcgccgccagcacaggcctgtaccacccgtacgcgcagcagccaatgcgcggcggcgggtggtgcaagcaggagcaggaccacgcggtgatcgcggccgcgcacagcctgcaggacctccaccacctgaacctgggcgcggccggcgcgcacgactttttctcggcagggcagcaggccgccgccgctgcgatgcacggcctgggtagcatcgacagtgcgtcgctcgagcacagcaccggctccaactccgtcgtctacaacggcggggtcggcgacagcaacggcgccagcgccgtcggcggcagtggcggtggctacatgatgccgatgagcgctgccggagcaaccactacatcggcaatggtgagccacgagcaggtgcatgcacgggcctacgacgaagccaagcaggctgctcagatggggtacgagagctacctggtgaacgcggagaacaatggtggcggaaggatgtctgcatgggggactgtcgtgtctgcagccgcggcggcagcagcaagcagcaacgacaacatggccgccgacgtcgggcatggcggcgcgcagctcttcagtgtctggaacgacacttaagcgtacctagtggtacctgacatcttatagtctgcaacctctcgtgtctgaattcctatctttatcaagtgttattgcttccacgactataggacagctttcgtcgaaagcttttgctcatgtgatctcgaaggattcatctagtctgatttttcgtgacttgtatcggttttattggattcatccaacatatatcaataaaaaatgagttgtgtttcctttcttcctagttcagttaaaattatttccctcctgcgcttgtgctgtaattgtctgtgtacctgttgtttgtgactgtgttagttcccttggatatgatttcgtatttgatatgtacatggagatagcttagcttcattattggagtatgaagttagtatgacatagtcactctcctggaaaattgacactgcaaaccatatttttattctgaaccacaaatcctagtcagtccgctggcatatgccgtccgtttgctgaatccagaacgtgggtttggagatgtacggctgagatgcctctatgcgaaggggatttcgtggtgaaacgagatgggagtagagcaacgcccgtggaagatgcttcaaacttccacacttttgagcaacgatcggcagtagtaaggtagacgatttcaagatcaaagcatatgaagataaacaacatcaacaacaaaatttgttggggttctatagagagaaacagagctacatacatacactgttttgtatctaccatctgagatgatgaaaagatgaaaaactaaagaatgccccggcgccaacgccaggacacgccgcgcgcgcgtcacccgagccatctcttgacccagccggcgctgtatatttacacacgttgcagcatcgatcaccacctgttcgatcgcgtcgccgtcaccggcgcgccgcgacttattgaactagtctagggcgcggctaacaacctagcttagattgccttgtctaaacccttaggctaacgcgccactctagaaggccgatctcccccgaacgcgccagatccgatatcgatgggccctggccgaagcttggtcacccggtccgggcctagaaggccgatctcccgggcacccagctttcttgtacaaagtggccgttaacggatcggccagaatggcccggaccgggttaccccgcggttcaaagccaatgactgttgttaggtccagtttctaaggacgaatcatccaatcactggttctttctgaacaaaacaaagagctatagagttacgttactgtagccgagacagagcctgcaatctggttatgccacatactaggttctttcttaaagttgactcactctatcctaagttctacttacaaggagctacaacaaattggtcataaccggagagcgttcaaggaggtaatatcccatcttactctgtagcaaggctacaaaaggagagctaaagaactaggctacaaaaagagagctaaagaactaactatctagcaagactacagagctatagtgtagagatttcataaccggtgagcgttcaaggatactttgaagagaagaggtaatatctcaactagcaagactacaaaaaaatggagatataaaactaactgtctaacaagactacagagctatagtagagatagatacgttcgacacttaagcatgagaattcgagctcggtaccctggttcacaaactcaatacaacacacagtggagtagggtattacgctccggcggcccgaaccactctaaatccttgtgtcctcgtgtgctcttccaccattaatgactgtaattgcagggacacgaagagttgtagcgcttttgccaacaagatccgctatatgctagtagagtggaacctgcacagcaacaagcatccaataatctgagaataagaattatgtgtggtgatggttctcatctctgcaactcgccattttcgcgagagaaccaaatccaagttggtgaagatcatgatttgggctcatgggctggcatagtagctattacctttgcaattgtggttcgaatctatccgatattctccttttcagggagagctaatgcttatgcttattgggtattttggtttgacactgcttcacgcccaaaaaaaggcaactatgtctgagttggatatggcccaaaaaaaggcagctatgtctgagttggatatggaagtcttctttcgtttagggtgaagtaagaccaagctcatgagcttattatcttaggtcggaacaaattagttgataggcatggcacatttatcaaattataatgattttaacagaaaagcaacacctctttttcagcagcaccagctttgcaagctgcaattgacactccaagcatagtatttgctccaaactcagcctgcatttcgcacaatatcatatctatttccatttggataaaatatattttccagaaatatgggaacagaatcaagatacagaaaaaagttgtggtagtagtggtaagtggaaacacaagtacagtgaaaagatagcattatttctgaacagtcaaattaaccgaaataagtagtatcacatactgcccctaaattgactacacccaatgtaaagaattgcttgagcatattgagccatcagttgtttgtttgtgtaacggatttgacaatgcagagttcaggagcaaaaaaccgcaaaggagagaaagagggaaaggatctcctagtatcccaccttgtggcgcgccctgtcaagtgcatgatggcctggtcgatctgcgtctgctgctgcggttccatcccaacgagtgcctccgacaccttgtcgttgatcacccgcaccgcgtaggcgacccccctggcgaggaacttccgcctctcggaggccccggccgcgtcggcggcggcgccctcgagcgcgcccacgctagccgtagatgctcggtgcacggccttgttggtgtgcaactcgacctcaacggccggtgcgctacgcccgtcaaggatctggcgcgcccgcaccctcgtgatcacggtgggcgcctcccgcctcatgtggccgacgatgaaaagcgccgggttaggggccttggcgcgcaccgccgtattcagggcctcctcgctcttgcgcgagagcaggtgcttccccaggtactcctgcactgacaaggctgccacagcggtggaatttgtcctcacgacttcgccacgtcgtcctcacctccctggcttcccacgactccgccgtatcgaggtgctcggtgggtcgtcttaatccgaagtccgaactaggaagacgagacagagaggtctgaggaatgggcctcgtttgatgttgagctgaattatttttccagcataagcccaggtcttggtccatgaacaaaattactagaaacccagcccagtactacgatctaaaagagggactgccactggatagctctctctagcattctccacgctccaatacagcggcgtcgtgtctatccgggtctatccgcgaacacgtgagaactctccagaaactgctttctcctccacttcatctctctcgctttccctctataaaaagaccccttctaggaattgagggagacagcaagcaccaagcagcgatccgaagctcaatcaattcactcaaacctcttccccaaatcttcgattagatcttcgttgacaagaagactagaaccgaacctgacatgtccaacctgctcacggttcaccagaaccttccggctcttccagtggacgcgacgtccgatgaagtcaggaagaacctcatggacatgttccgcgacaggcaagcgttcagcgagcacacctggaagatgctgctctccgtctgccgctcctgggctgcatggtgcaagctgaacaacaggaagtggttccccgctgagcccgaggacgtgagggattaccttctgtacctgcaagcgcgaggtttgtttctgcttctacctttgatatatatataataattatcattaattagtagtaatataatatttcaaatatttttttcaaaataaaagaatgtagtatatagcaattgcttttctgtagtttataagtgtgtatattttaatttataacttttctaatatatgaccaaaacatggtgatgcctaggtctggcagtgaagaccatccagcaacaccttggacaactgaacatgcttcacaggcgctccggcctcccgcgccccagcgactcgaacgccgtgagcctcgtcatgcgccgcatcaggaaggaaaacgtcgatgccggcgaaagggcaaagcaggccctcgcgttcgagaggaccgatttcgaccaggtccgcagcctgatggagaacagcgacaggtgccaggacattaggaacctggcgttcctcggaattgcatacaacacgctcctcaggatcgcggaaattgcccgcattcgcgtgaaggacattagccgcaccgacggcggcaggatgcttatccacattggcaggaccaagacgctcgtttccaccgcaggcgtcgaaaaggccctcagcctcggagtgaccaagctcgtcgaacgctggatctccgtgtccggcgtcgcggacgacccaaacaactacctcttctgccgcgtccgcaagaacggggtggctgcccctagcgccaccagccaactcagcacgagggccttggaaggtattttcgaggccacccaccgcctgatctacggcgcgaaggatgacagcggtcaacgctacctcgcatggtccgggcactccgcccgcgttggagctgctagggacatggcccgcgccggtgtttccatccccgaaatcatgcaggcgggtggatggacgaacgtgaacattgtcatgaactacattcgcaaccttgacagcgagacgggcgcaatggttcgcctcctggaagatggtgactgaggtacccaacctagacttgtccatcttctggattggccaacttaattaatgtatgaaataaaaggatgcacacatagtgacatgctaatcactataatgtgggcatcaaagttgtgtgttatgtgtaattactagttatctgaataaaagagaaagagatcatccatatttcttatcctaaatgaatgtcacgtgtctttataattctttgatgaaccagatgcatttcattaaccaaatccatatacatataaatattaatcatatataattaatatcaattgggttagcaaaacaaatctagtctaggtgtgttttgcgatccgatatcgaattggccacggtaccagctgctgctgttctagggttcacaagtctgcctatttgtcttccccaatggagctatggttgtctggtctggtccttggtcgtgtcccgtttcattgtgtactatttacctgtaatgtgtatccttaagtctggtttgatggtgtctgaaacgttttgctgtggtagagcagcatggaagaactataatgaataagtgatccctaatcattgtgtccaaattttgcttctgctatacccttttgtgctgtttcttatgttttgcttaaaaatttgatctgacaaacaaatttgtctaaattatgctcttgttctgactgtgtactgtacacatttgtattgctaccggtttggcacatagttttctctttgattgcagatcaaacccttctgattgcagattgcttggctatggctgatgtgctcactgttcttctttagcttgtatattgctgatggtggcttggctacggctgaaaaagttgctgctgcgccgacttggcaactgttgctccagtaatgctttgtcctctcttcctagccgccgacttggcacttggcagctgttgctcctgtaatgcgttgttatctcttatctcttgagatgtactatgattttgaggctgtttgacttgtgccagattgccagtgctgatgctatattatctcaggtttttatgctagtatatgttttactgtgtgctgcctgtgtcgagttacgtaatctattgaaccgctatgcgtgttgatgccctgttgttgcttgccagattgatgcccctgttgcttgcagcttgcaagctgtagtgaaatcctaaaattccaaaccaaatctattctgaacttttgaagatctgtgatgtccggaagaaaagattcaaacagataaacgggactctccagaatctataaaataaatgatcgacaaacgctttgctttggtaggcttcaagcttggtcacccggtccgggcctagaaggccagcttcggccgccccgggcaactttattatacaaagttgatagataaatcagatatctggttcctaaggacccggcggaccgattaaactgattcggtccgacgcgttacctaataacttcgtatagcatacattatacgaagttattagctaactaactagtaagcgtacacctgagcggttaccgaattcctgcccttaaggccaattgttcaagattcattcaacaattgaaacatctcccatgattaaatcagtataaggttgctatggtcttgcttgacaaagtttttttttgagggaatttcaactaaatttttgagtgaaactatcaaatactgattttaaaaaatttttataaaaggaagcgcagagataaaaggccatctatgctacaaaagtacccaaaaatgtaatcctaaagtatgaattgcattttttttttgtttggacgaaaggaaaggagtattaccacaagaatgatatcatcttcatatttagatcttttttgggtaaagcttgagattctctaaatatagagaaatcagaagaaaaaaaaaccgtgttttggtggttttgatttctagcctccacaataactttgacggcgtcgacaagtctaacggacaccaagcagcgaaccaccagcgccgagccaagcgaagcagacggccgagacgttgacaccttcggcgcggcatctctcgagagttccgctccggcgctccacctccaccgctggcggtttcttattccgttccgttccgcctcctgctctgctcctctccacaccacacggcacgaaaccgttacggcaccggcagcacccagcacgggagaggggattcctttcccaccgttccttccctttccgccccgccgctataaatagccagccccatccccagcttttttccccaatctcatctcctctctcctgttgttcggagcacacgcacaatccgatcgatccccaaatccccttcgtctctcctcgcgagcctcgtggatcccagcttcaaggtacggcgatcgatcatcccccctccttctctctaccttcttttctctagactacatcggatggcgatccatggttagggcctgctagtttcccttcctgttttgtcgatggctgcgaggcacaatagatctgatggcgttatgacggctaacttgtcatgttgttgcgatttatagtccctttaggagatcagtttaatttctcggatggttcgagatcggtggtccatggttagtaccctaagatccgcgctgttagggttcgtagatggaggcgacctgttctgattgttaacttgtcagtacctgggaaatcctgggatggttctagctcgtccgcagatgagatcgatttcatgatcctctgtatcttgtttcgttgcctaggttccgtctaatctatccgtggtatgatgtagatgttttgatcgtgctaactacgtcttgtaaagttaattgtcaggtcataatttttagcatgcctttttttttgtttggttttgtctaattgggctgtcgttctagatcagagtagaagactgttccaaactacctgctggatttattgaacttggatctgtatgtgtgtcacatatcttcataaattcatgattaagatggattgaaatatcttttatctttttggtatggatagttctatatgttggtgtggctttgttagatgtatacatgcttagatacatgaagcaacgtgctgctactgtttagtaattgctgttcatttgtctaataaacagataaggatatgtatttatgttgctgttggttttgctggtactttgttggatacaaatgcttcaatacagaaaacagcatgctgctacgatttaccatttatctaatcttatcatatgtctaatctaataaacaaacatgcttttaaattatcttcatatgcttggatgatggcatacacagcggctatgtgtggttttttaaatacccagcatcatgggcatgcatgacactgctttaatatgctttttatttgcttgagactgtttcttttgtttatactgaccctttagttcggtgactcttctgcaggtcgactttaacttagcctaggatccatggcccagtccaagcacggcctgaccaaggagatgaccatgaagtaccgcatggagggctgcgtggacggccacaagttcgtgatcaccggcgagggcatcggctaccccttcaagggcaagcaggccatcaacctgtgcgtggtggagggcggccccttgcccttcgccgaggacatcttgtccgccgccttcatgtacggcaaccgcgtgttcaccgagtacccccaggacatcgtcgactacttcaagaactcctgccccgccggctacacctgggaccgctccttcctgttcgaggacggcgccgtgtgcatctgcaacgccgacatcaccgtgagcgtggaggagaactgcatgtaccacgagtccaagttctacggcgtgaacttccccgccgacggccccgtgatgaagaagatgaccgacaactgggagccctcctgcgagaagatcatccccgtgcccaagcagggcatcttgaagggcgacgtgagcatgtacctgctgctgaaggacggtggccgcttgcgctgccagttcgacaccgtgtacaaggccaagtccgtgccccgcaagatgcccgactggcacttcatccagcacaagctgacccgcgaggaccgcagcgacgccaagaaccagaagtggcacctgaccgagcacgccatcgcctccggctccgccttgccctccggactcagatctcgatagggtaccaatggccagttaacagatccagctgctgctgttctagggttcacaagtctgcctatttgtcttccccaatggagctatggttgtctggtctggtccttggtcgtgtcccgtttcattgtgtactatttacctgtaatgtgtatccttaagtctggtttgatggtgtctgaaacgttttgctgtggtagagcagcatggaagaactataatgaataagtgatccctaatcattgtgtccaaattttgcttctgctatacccttttgtgctgtttcttatgttttgcttaaaaatttgatctgacaaacaaatttgtctaaattatgctcttgttctgactgtgtactgtacacatttgtattgctaccggtttggcacatagttttctctttgattgcagatcaaacccttctgattgcagattgcttggctatggctgatgtgctcactgttcttctttagcttgtatattgctgatggtggcttggctacggctgaaaaagttgctgctgcgccgacttggcaactgttgctccagtaatgctttgtcctctcttcctagccgccgacttggcacttggcagctgttgctcctgtaatgcgttgttatctcttatctcttgagatgtactatgattttgaggctgtttgacttgtgccagattgccagtgctgatgctatattatctcaggtttttatgctagtatatgttttactgtgtgctgcctgtgtcgagttacgtaatctattgaaccgctatgcgtgttgatgccctgttgttgcttgccagattgatgcccctgttgcttgcagcttgcaagctgtagtgaaatcctaaaattcgaaaccaaatctattctgaacttttgaagatctgtgatgtccggaagaaaagattcaaacagataaacgggactctccagaatctataaaataaatgatcgacaaacgctttgctttggtaggcttcctagttagttagcggaccgaagcttcggtccgggcctgcggccgcagatatcagaacctgcgtctggacgcacaagtcatagcattatcggctaaaatttcttaatttctaaattagtcatatcggctaagaaagtggggagcactatcatttcgtagaacaagaacaaggtatcatatatatatatatatataatatttaaactttgttaagtggaatcaaagtgctagtattaatggagtttcatgtgcattaaattttatgtcacatcagcaattttgttgacttggcaaggtcatttagggtgtgtttggaagacaggggctattaggagtattaaacatagtctaattacaaaactaattgcacaaccgctaagctgaatcgcgagatggatctattaagcttaattagtccatgatttgacaatgtggtgctacaataaccatttgctaatgatggattacttaggtttaatagattcgtctcgtgatttagcctatgggttctgctattaattttgtaattagctcatatttagttcttataattagtatccgaacatccaatgtgacatgctaaagtttaaccctggtatccaaatgaagtcttatgagagtttcatcactccggtggtatatgtacttaggctccgttttcttccaccgacttatttttagcacccgtcacattgaatgtttagatactaattagaagtattaaacgtagactatttacaaaatccattacataagacgaatctaaacggcgagacgaatctattaaacctaattagtccatgatttgacaatgtgttgctacagtaaacatttgctaatgatggattaattaggcttaatagattcgtctcgccgtttagcctccacttatgtaatgggttttctaaacaatctacgtttaatactcctaattagtatctaaatattcaatgtgacacgtgctaaaaataagtcagtggaaggaagagaacgtccccttagttttccatcttattaattgtacgatgaaactgtgcagccagatgattgacaatcgcaatacttcaactagtgggccatgcacatcagcgacgtgtaacgtcgtgagttgctgttcccgtagagaaatatcaactggtgggccacgcacatcagcgtcgtgtaacgtggacggaggagccccgtgacggcgtcgacatcgaacggccaccaaccacggaaccacccgtccccacctctcggaagctccgctccacggcgtcgacatctaacggctaccagcaggcgtacgggttggagtggactccttgcctctttgcgctggcggcttccggaaattgcgtggcggagacgaggcgggctcgtctcacacggcacggaagacgtcacgggttccttccccacctctcctcttccccaccgccataaatagccgaccccctcgcctttctccccaatctcatctcgtctcgtgttgttcggagcacaccacccgccccaaatcgttcttcccgcaagcctcggcgatccttcacccgcttcaaggtacggcgatcgtcttcctcctctagatcggcgtgatctgcaagtagttgatttggtagatggttaggatctgtgcactgaagaaatcatgttagatccgcgatgtttctgttcgtagatggctgggaggtggaatttttgtgtagatctgatatgttctcctgtttatcttgtcacgctcctgcgatttgtggggattttaggtcgttgatctgggaatcgtggggttgcttctaggctgttcgtagatgaggtcgttctcacggtttactggatcattgcctagtagatcagctcgggctttcgtctttgtatatggtgcccatacttgcatctatgatctggttccgtggtgttacctaggtttctgcgcctgattcgtccgatcgattttgttagcatgtggtaaacgtttggtcatggtctgatttagattagagtcgaataggatgatctcgatctagctcttgggattaatatgcatgtgtcaccaatctgttccgtggttaagatgatgaatctatgcttagttaatgggtgtagatatatatgctgctgttcctcaatgatgccgtagcttttacctgagcagcatggatcgtcctgttacttaggtagatgcacatgcttatagatcaagatatgtactgctactgttggaattctttagtatacctgatgatcatccatgctcttgttacttgttttggtatacttggatgatggcatgctgctgctttttgttgatttgagcccatccatatctgcatatgtcacatgattaagatgattacgctgtttctgtatgatgccatagcttttatgtgagcaacatgcatcctcctggttatatgcattaatagatggaagatatctattgctacaatttgatgattattttgtacatacgatgatcaagcatgctcttcatactttgttgatatacttggataatgaaatgctgctgcacgttcattctatagcactaatgatgtgatgaacacgcacgacctgtttgtggcatctgtttgaatgtgttgttgctgttcactagagactgttttattaacctactgctagatacttacccttctgtctgtttattcttttgcagccagaatagcggatccgcccatggtcgaacaggacggcctgcatgcaggatcaccagcggcctgggtcgaaagactcttcggctacgactgggcacaacagaccatcgggtgtagcgacgcagctgttttcaggctgtccgcacagggcagacccgttttgttcgtcaaaacagacctgtctggcgcgctcaacgaactgcaagacgaggccgcaagactgagctggcttgctaccacaggcgttccttgtgctgcagtcctcgacgtcgttactgaggctggaagagactggctgctcctgggtgaagtcccaggacaggaccttttgtccagccatctggcacctgccgaaaaggtcagcatcatggcagacgccatgagaaggctgcacacactcgaccctgcaacatgccccttcgatcaccaggcaaaacacaggatcgagcgcgcaagaacgcgcatggaggctggtttggtcgaccaagatgacctcgacgaggaacaccaaggactggctcctgctgaactcttcgccagactcaaggcgagaatgccagacggtgacgacctggtcgtcacacacggcgacgcttgtctcccaaacataatggtcgagaacggacgcttcagcggtttcatcgactgcggtagactcggagtcgctgacagataccaggacatcgccctggcaacacgcgacatcgcagaggaactcggaggcgaatgggctgacaggtttctcgtgctctacggtatcgctgctccagacagccagaggatcgcattctacaggctcctcgacgagttcttttagttcgaacggtacccggggatcctctagtgccgtgggtcgtttaagctgccgctgtacctgtgtcgtctggtgccttctggtgtacctgggaggttgtcgtctatcaagtatctgtggttggtgtcatgagtcagtgagtcccaatactgttcgtgtcctgtgtgcattatacccaaaactgttatgggcaaatcatgaataagcttgatgttcgaacttaaaagtctctgctcaatatggtattatggttgtttttgttcgtctcctaatatttgcctgggatcaaattttattggctggtgttcatttgacctccatgttcttgctaggctccattttttactctacagccataatatgtttgattgtttggtttgttctttgttgtacacctggttctgtcgagcttagttttcgacactggcttacagcttaacatgttgctattttattgggttctgattgctattttattgggttctgattgctagtttttgctgaatccaaaaaccatgttatttatttaagcgatccaggttattattatgatggtggctaagtttttttttttccaagggtaaattttctggattctccagtgtttctgtggccgaattcaatcactagagtcgacctgcatgattccgatgacttcgtaggttcctagctcaagccgctcgtgtccaagcgtcacttacgattagctaatgattacggcatctaggaccgactagctagctagctaagagctcggtaccgagctcgaattcattccgattaatcgtggcctcttgctcttcaggatgaagagctatgtttaaacgtgcaagcgctactagacaattcagtacattaaaaacgtccgcaatgtgttattaagttgtctaagcgtcaatttgtttacaccacaatatatcctgcca

SEQ ID NO: 287 - DNA, 1563 bp, Brachypodium distachyon
  source 1..1563: mol_type = unassigned DNA
ggcgtcaggactggcgaagtctggactctgcagggccgaactgctgaagacgaagcagaggaagagaaagggaagtgttcgacttgtaatttgtaggggttttttttagaggaacttgtaatttgtaggtgggctggcctcgttggaaaaacgatgctggctggttgggctgggccgatgtacgcttgcaaacaacttgtggcggcccgttctggacgagcaggagtttcttttttgttctcacttttctggtcttctttagttacggagtaccttttgttttttaaaggagttaccttttttttaggaattctttagttacctttcgcttgctctcaaaaaatatttaactttcgctttttttcattttaatttttgcaactatttacgagtttcatgaatgcttattttccagcatatcattatttgcaagtatttttatgccgtatgtattggacgagagccatcgggactgttccagagactgcgtggtggggacggctcccaaccgccttttctatctctgttcgcatccggtggccgacttggctcgcgcgtgagccgtgacgtaacagacttggtctcttccccatctggccatctataaattcccccatcgatcgaccctccctttccccaatccagcacccccgatcccgatcgaaaattctccgcaacagcaagcgatcgatctagcgaatccccgtcaaggtatgtagcctctcgattcctcctcagccctgccctcgatttggtgtacgcgttgagatgatgatctcgtagatgtctagatgacaccttgtcgatttgaaatagatcagatccgtgtagatcgatgagctcctgtgtacctgtggattcaagttattttcgcatgctattgttgtgatctactagatctagtgtgtgtattctatgctatcgatttctccgtgtagatttcactcgattactgttactgtggcttgatcggccatagatgttggttaaggtttgatcggttagtgtttgaacctgcgtggatatctagcatccatctattatcgtgtaggtatcgaacaaacaagcactattattgtactgatggttcgtctatggttggttttgaccgttttagtgttgaacgagccttctgtatttgtttattgctgtccagtgatgtaccatgttcgttgagtgtcggattatactaattattgttgattgataatcttgtagtttgcttttcctaatttatttatcgtagtcctgatttgcctcagctgtgcctcacccgtgcgatggtcaatcaacttgttagcccaatctgcttaatcatgtacatttgttgttagaatcagagatcaagccaattagctatcttattgcttatctgttccatgttctgatcgatgtaacagtctacacttttgctctgtgctacttgattaaaacattctgacttaaattcatgattggaagtttcagatctgattgttgccttacttgactaatatctattcatgtgacacctctctgtcttggtaacttaccgctgtttgtttgtaatttctgactatgcag

SEQ ID NO: 288 - DNA, 2077 bp, Brachypodium distachyon
  source 1..2077: mol_type = unassigned DNA
ctgctcgttcagcccacagtaacacgccgtgcgacatgcagatgccctccaccacgccgaccaaccccaagtccgccgcgctcgtccacggcgccatccgcatccgcgcgtcaacgtcatccggaggaggcgagcgcgatctcgacggccacggcggcggcggacacgacggcgacgccccgactccgcgcgcgcgtcaaggctgcagtggcgtcgtggtggccgtccgcctgcacgagatccccgcgtggacgagcgccgcctccacccagcccctatatcgagaaatcaacggtgggctcgagctcctcagcaacctccccacccccccttccgaccacgctcccttcccccgtgcccctcttctccgtaaacccgagccgccgagaacaacaccaacgaaagggcgaagagaatcgccatagagaggagatgggcggaggcggatagtttcagccattcacggagaaatggggaggagagaacacgacatcatacggacgcgaccctctagctggctggctgtcctaaagaatcgaacggaatcgctgcgccaggagaaaacgaacggtcctgaagcatgtgcgcccggttcttccaaaacacttatctttaagattgaagtagtatatatgactgaaatttttacaaggtttttccccataaaacaggtgagcttatctcatccttttgtttaggatgtacgtattatatatgactgaatattttttattttcattgaatgaagattttcgaccccccaaaaataaaaaacggagggagtacctttgtgccgtgtatatggactagagccatcgggacgtttccggagactgcgtggtgggggcgatggacgcacaacgaccgcattttcggttgccgactcgccgttcgcatctggtaggcacgactcgtcgggttcggctcttgcgtgagccgtgacgtaacagacccgttctcttcccccgtctggccatccataaatcccccctccatcggcttccctttcctcaatccagcaccctgattccgatcgaaaagtccccgcaagagcaagcgaccgatctcgtgaatctccgtcaaggtatgcagcctcgcttcctcctcgctaccgtttcaattctggagtaggtcgtagaggataccatgttgatttgacagagggagtagattagatacttgtagatcgaagtgcggatgttccatggtagatgataccatgttgatttcgattagatcggattaaatctttgtagatcgaagtgcgcatgttccatgaattgcctgttaccagtagattcaagtttttctgtgttatagaggtgggatctactcgttgagatgattagctcctagaggacaccatgccgttttggaaaatagatcagaaccgtgtagatcgatgtgagcatgtgttcctgtagatccaagttctttcgcatgttactagttgtgatctattgtttgtgtaatacgctctcgatctatccgtgtagatttcactcgattactgttactgtggcttgatcgttcatagttgttcgttaggtttgatcgaacagtgtctgaacctaattggatatgtattcttgatctatcaacgtgtaggtttcagtcatgtatttatgtactccctccgtcccaaattaactgacgtggattttgtataagaatctatacaaatccatgtcagttaattcgggatggagtaccatattcaataatttgtttattgctgtccacttatgtaccatatgtttgttgttcctcatgtggattctactaattatcattgattggtgatcttctattttgctagtttcctagctcaatctggttattcatgtagatgtgttgttgaaatcggagaccatgcttgttattagatagtttattgcttatcagtttcatgttctggttgatgcaacacatattcatgttcgctatctggttgctgcttgatattctctgatttacattcattataagaatatattctgctctggttgttgcttctcatgactttacctactcggtaggtgacttaccttttggtttacaattgtcaactatgcag

SEQ ID NO: 289 - DNA, 1054 bp, banana streak virus
  source 1..1054: mol_type = unassigned DNA
gataaaaaggagttgatcataagaacagacagccaggccattgtagccttctacaagaagcaagcggatcacaagccttcaagaacgagatggcttatgttgattgattacattactgggctcggaatcaacgttaaatttgagcacattgacggaaaagaaaatgtcctagctgacactttatcaagattggtccaagttctaatcacaagggttcatcatccagcagagactcagctagttgaagccgtcatggaagtcctgagcaatccgaaaaaggaagccttggataaggtaaatcattttatctttctaacccaacaatggattgcagaacaaagaaaggagcatatggtgaacacactgctccagttggaagaacctcaactacactgcggctgcaaagatcacacaacaggagaaagaaggaacgccgttcttctccaaagtcacacctcagccaacccgtatagatggttctataagtgtgcacaagacagatgtcacacttggatttggaaggacatcctggaccagtatgctgaagattatgccgcttacaccaggattggacttgaggcacttagccttgaagactggttcgaagaaccagaacccgatccacctgacccagtggaccgccagaagatagaagatatcctggacctgcaagatgtcagcaatgacgattgaaagattcccaggatagccggcggacgtggtggacccagtctaggtgcgatgcttagtcacgcacgatgactctgtcggaaggcatctttactttcggcaaactttaataatactttaggaaaagtattgtacaagttaggtgcagaatcaataatgcacccagctttagtcttgtctactgaattattgtgtcggttgcattattggatgcctgcgtgcaccctaagcaatccccggctctcatctctataagaggagcctttgtattcagttgcaagcatgcaagtcacacactgcaagcttacttctgagcaaaaagagttttgagtgaaataaatttgaagttcccccttacatcttg

SEQ ID NO: 290 - DNA, 320 bp, Agrobacterium tumefaciens
  source 1..320: mol_type = unassigned DNA
acactgatagtttaaactgaaggcgggaaacgacaatctgatcatgagcggagaattaagggagtcacgttatgacccccgccgatgacgcgggacaagccgttttacgtttggaactgacagaaccgcaacgattgaaggagccactcagccgcgggtttctggagtttaatgagctaagcacatacgtcagaaaccattattgcgcgttcaaaagtcgcctaaggtcactatcagctagcaaatatttcttgtcaaaaatgctccactgacgttccataaattcccctcggtatccaattagagtctcatattcactc

SEQ ID NO: 291 - DNA, 1095 bp, Zea mays
  source 1..1095: mol_type = unassigned DNA
aggcgacccatcgctgctttgtctacatcatgttcttcatcatcctccccaggcgacgcgtgctgctgttcttattcagactaccgttcgagtgactgcatggcgtacatctttctgcatcgactttgtacggctacatcgaacatatacacgagatgtctcgtgtgaatagagtcactaatgccttaagcatcggttactccgtagggtacattctgttcttcttatttgtgcatatttttattgttgtttactgattatacgagtagttatacatacatgcacatacatatcatcacatatatcacaatatttttctaaattaaattaaaactaaaaatgactaaatttctaacaccaacgacattgtaatgttttctccaacaactttacctattctacattgttctatttcgaatttcactctataaacaacatagtctacaatggaaaacagtgctttgtacgactatatacgcgatgtgtggctacaacataagacaatatagtcgtttgaagattgaacctatatatcggtacggttaatccgtctatgtacgtgggcatgacgaacacccgtgataacgaaggattaacgtgcacaatcataaatccaaagtaggagcggtgcatgatgagaatcgctctcagtactcgacataatgaaccttacgaggtacaacaggcaggcaggcagggaccaggggccgcctttatttcaggctcgctggccccacgggcgtgctgcgtgcacgaagggcactaccccaacctctcaccgaaaaccgcgctggatcggcaaatcaaacgaggtggtgccccgtgcccactctccacgtccacggcaccatccctctgcagccgctcaccagccatgccgtgtcgcggaacggcacaaccacccccaacccactcacgaaaccccgtcccggccgtgcccgtgtcggtccgcgctcggcaacgaggcggcccgcgctgctgagtcccctggacacccgacaccctgtcggccctttgtttattcatcccgaaatctcatctgcccccacggccgactgcgctgcgccgcccggatatatatacccatcgttatcg

SEQ ID NO: 292 - DNA, 971 bp, Zea mays
  source 1..971: mol_type = unassigned DNA
ccctagctccctgcggctgttacgcggtcccccatcaatcttctgttcttgcggttgtagcctgtgtaacagtgctagagtatgtatgataaataggttttaagtctgcttacatgacattttttattgtggaagagacatataaaaattagagagagtggttctcatgcaacggcggacggcccggtgctaaaagagcttcaagacaaaataatgaaacaggaagagagtagatttatctaagagccaactttattatatgaatgtgtttattgttggctttagatgatatggtaaggagttagagctaataatagataggctctattattattattattaattaaactcgctctaaggaggaaagtgggaggaagggacgaggacgaagactactggaagcatcgtgcatggatgatggatgtggtgtctcttaatgtaggtggccggaggatgtacgtgttaattgcgcgataagcactcagatccaaccgcaaactacctccacactgacacactgatagagagaaagagagacctccgacgactgccgccgcagatgagccacgtacgtatacgacgtctgccggccggctcaggctgccgccatcaccctgctcgaaagtcgcgttaggcggcgccagctacataggagtatctagtctagccagttagtatactactactgcgctgatgatgaattaactctgcatagatactgtacttgcctccctccaacacccaaccacctcctgctcggctcttaataacttggacacggatcgatgccatccaaggaagaacacgacgacgacgacggaacatccaccatgcaagcttgcatccatacgccgatacgcgtgcatccatccatccaccattatttccattttccaccgatcacacgtacacaggcctatttaaggagcgacatcccactgcaactctcctcaccactcatcaccagctag

SEQ ID NO: 293 - DNA, 436 bp, Cauliflower mosaic virus
  source 1..436: mol_type = unassigned DNA
catggagtcaaagattcaaatagaggacctaacagaactcgccgtaaagactggcgaacagttcatacagagtctcttacgactcaatgacaagaagaaaatcttcgtcaacatggtggagcacgacacgcttgtctactccaaaaatatcaaagatacagtctcagaagaccaaagggcaattgagacttttcaacaaagggtaatatccggaaacctcctcggattccattgcccagctatctgtcactttattgtgaagatagtggaaaaggaaggtggctcctacaaatgccatcattgcgataaaggaaaggccatcgttgaagatgcctctgccgacagtggtcccaaagatggacccccacccacgaggagcatcgtggaaaaagaagacgttccaaccacgtcttcaaagcaagtggattgatgtgat

SEQ ID NO: 294 - DNA, 467 bp, Zea mays
  source 1..467: mol_type = unassigned DNA
ccggctttaattcgtaacgagcagtttataccgttttgcgctgcattcaccttcgtgagtccggaccccggaagacaggaactgtagcctttttccctttgctagcatgaatatgaatagaataacacgaatttaacatcaattcagctcatattggaacaatctacgcctaaaatttagtggaacacgttttgctcattttccttgaaaagcaacagtgaagcaacatcggtaaaggttcttttggttgcctctaacggtctaacctgaggattcagttataatctggaacatgacagaaacagagcctcgcacccgttttgggaccaaaaccacatgatcgatctccaagaagattattttggacaatatttttccagccacaggcaatccgaagaccacaaatcagaggcactccaaatgcagcccatccattggaccatacagataagacccggataaggcag

SEQ ID NO: 295 - DNA, 770 bp, sugarcane bacilliform virus
  source 1..770: mol_type = unassigned DNA
aagcttattgaatggggaaaacaaattcttgatccattccccaaattcaagaaggatatgtttgaaagaactgaacatatcatgatggcaacacaagagcctacgctactatgtggatgcaggaagcctgcaatcatgttaacatcaggaacaaggcttaatcctcgtagaagattttacaagtgtgccatgaatatctgccactgctggtattgggcagatttacttgaagaatacgtgcaagagaggatcgaagatttcatggttgaaaacttcgacaagaaagcaaagctggatgaaccaagttcatcaaacgttcaccatgatgattatgaagaacaccgttcgagtgtcatcgacaggccaaggccaacagatgatcatttcagaccatggggggatgttacatactggctgaataaagaagcagaagagtgccacacaaggggcgacaacgtcgaaggcgcagaagacgcagtcgatctcactgacgtaagcaatgacgaccagtggaggagatcgtaagcaatgacgtatggagcgtggaggacccatgaaagcactgagaaggcatctcaactttcggtgtgtgagtgcgcatcctatgcgatgctttgtacctttgttagctgtgtgtgtccttttggcatctgtgccactttacctttgtcggccacgttgcctttgcttagcatctacgcaagcatagcgctcggctggtgtgtgttccctctgcctatataaggcatggttgtatgactcttacactc

SEQ ID NO: 296 - DNA, 88 bp, synthetic construct
  misc_feature 1..88: note = 8xDR5 PRO
  source 1..88: mol_type = other DNA
ccttttgtctcccttttgtctcccttttgtctcccttttgtctcccttttgtctcccttttgtctcccttttgtctcccttttgtctc

SEQ ID NO: 297 - DNA, 41 bp, Flaveria trinervia
  source 1..41: mol_type = unassigned DNA
gtgaatttatgagagctgtacttactcactaaaacaaacaa

SEQ ID NO: 298 - DNA, 2164 bp, Zea mays
  source 1..2164: mol_type = unassigned DNA
ttcgttaccaactgggttgcataggatttcatgattaagagtgtgtttggtttagctgtgagttttctcctatgaaaaaactgttgtgagaaaaaatagttggaagtcgtttagttcaaactgttgtgagttatccactgtaaacaaattgtatattgtttatatacactctgtttaaatatatctcttaatcagtatatataattaaaaaactaatttcacatttgtgttcctaatattttttacaaataaatcattgtttaattccatttgtaataagtttttattaaaattgcttttatttcatttattataaacatttaattgttttaatcctattttagttttaatttattgtatctatttattaatataacgaacttcgataagaaacaaaagcaaggtcaaggtgttttttcaaagtagttgtggaaaagctgaaccccttttattcaacttttagaagcaggaaaacagaaccaaacagaccctaaaaatgtgtgaatttttagcaggttaattattcgcatctctttggtcatgtttaagaggctggaatagatcaactgcaagaacacatagcagagtggatagggggggggggggggagggtcgtcgtctccctatctgacctctcttctgcattggattgcctttttcggtactctatttaaaacttaaaagtacaaatgaggtgccggattgatggagtgatatataagtttgatgtgtttttcacataagtgacaagtattattgaaagagaacatttgcattgctactgtttgcatatgggaaaattgagaattgtatcatgccatggccgatcagttctttacttagctcgatgtaatgcacaatgttgatagtatgtcgaggatctagcgatgtaatggtgttaggacacgtggttagctactaatataaatgtaaggtcattcgatggtttttctattttcaattacctagcattatctcatttctaattgtgataacaaatgcattagaccataattctgtaaatatgtacatttaagcacacagtctatattttaaaattcttctttttgtgtggatatcccaacccaaatccacctctctcttcaatccgtgcatgttcaccgctgccaagtgccaacaacacatcgcatcgtgcatatctttgttggcttgtgcacggtcggcgccaatggaggagacacctgtacggtgcccttggtagaacaacatccttatccctatatgtatggtgcccttcgtagaatgacaccccttatccctacaatagccatgtatgcataccaagaattaaatatactttttcttgaaccacaataatttattatagcggcacttcttgttcaggttgaacacttatttggaacaataaaatgccgagttcctaaccacaggttcacttttttttttccttatcctcctaggaaactaaattttaaaatcataaatttaatttaaatgttaatggaaacaaaaaattatctacaaagacgactcttagccacagccgcctcactgcaccctcaaccacatcctgcaaacagacaccctcgccacatccctccagattcttcactccgatgcagcctacttgctaacagacgccctctccacatcctgcaaagcattcctccaaattcttgcgatcccccgaatccagcattaactgctaagggacgccctctccacatcctgctacccaattagccaacggaataacacaagaaggcaggtgagcagtgacaaagcacgtcaacagcaccgagccaagccaaaaaggagcaaggaggagcaagcccaagccgcagccgcagctctccaggtccccttgcgattgccgccagcagtagcagacacccctctccacatcccctccggccgctaacagcagcaagccaagccaaaaaggagcctcagccgcagccggttccgttgcggttaccgccgatcacatgcccaaggccgcgcctttccgaacgccgagggccgcccgttcccgtgcacagccacacacacacccgcccgccaacgactccccatccctatttgaacccacccgcgcactgcattgatcaccaatcgcatcgcagcagcacgagcagcacgccgtgccgctccaaccatctcgcttccgtgcttagcttcc

SEQ ID NO: 299 - DNA, 2041 bp, Zea mays
  source 1..2041: mol_type = unassigned DNA
ctaactaactaggcagcctagtatcagcaaaggatttaagtgaatctcacttcgcacaaaactgtcaattcaaggcttagtccattgttcagttgtgaatgggtgaaacttttattctagatggatgttcaacttaacagtctccatcgaaacactggtatatcaaaggattgtgattatgatacttcatcattacaaaccctagaatttggtgggggttgttggatcttttatgggcttggcccatttattgaataaactctatgctgtgtaatggtggagaataccaatagtaccatattggaagtccaagggtcttttggcttgacttatatggtgggaattattccacctaacttgagaagtcaagaaacggaaaagggcgtgccaccggccgggccgggctcgggccggccgtggcgtggcaggcgagcgggcgtggtgtggttgtgttaatttttagcactcactaaccgtggttgtgttaatttttagcactcactaaccgcgtaaacctttcagttgcctgtctcttcgtcagcagcatgcgagacccttgtccttcagctgcccgtctcttggcgtgccgcatgcgacccttctccttcagcttccctttgagagaggttaagtagaggagaacccttggcacttggtacacgagaaacagaactatttcagagtcacagcccagccgcaagtgagagtattcccatctcgtgactctacgcgcacagagcagcgagagggcaggtgcctccgaagcccttgccgttcgagaccttgcacgggggatcggcaattaggtttttggggagcgtctacgcgactgcccaaaacatcttctttctggctacatgacaagggaagctggacaaagatctggatcatcagagcgcatgagagggtatgatcagtttatttttttactgttttacgttctacagattagatatgtttcatatattcatctgtgctgttttatatgtagcaatgattttagcttatctgttctgtcttattataatatgttatatctgtctgttttaattttacagtcatgttgtttatgtttctatctgtttattttgaattgttcagtcagtttatatgcttatcattatatgatttatatgattcatatgctgtgtgttctcatgatccatattgttatggatatatttgagatcacacttttatatgttatcattataatgttaatttatataattaaaatgatatgaaaaatgcctatatatctaacgttcaaattaattgataggcaattatccctagactgctagtatatagtcttctagttaactaattcatgcttgatgcgtacgtgcttatgaagtatcggctatttgtcaagatcattggccataggacagtagtggtccaaaagatctagatctccgttgggagcagggtcacaacgtagggaaaggaaaggtggacaatacgtgaaacctcatcctttcacaggaaaggcgcctcatcgggatgcaaggtcgctttcacacatgcatacatgatatttgaggggatcggcagtgcatattttagaattgaagggcatgcatgatattttacaatctttaatcttttaattcgaaaataaatgacaaatatttaagaacgaagttagtattaggcagaagcttgcatcgcatctttctcgcaggtggtgggatttgctcaggaggcatgataggtacttggacggttcccaattttaggcggcggagcggaatacttttagaaatcagagaacttgaatttctccacaaagccatccttggccatcgtccatcgatcaaaatatctgcatacaccagctagctgacacagggtgggtgccagagtgcccgtgaccaaccacgccccatctgctaaacacgtagccatgcatggcgccacggccacgccagccaagatatttgttgccctcgtctcgtcttgtgcccttcttaatataaaccttgtgcccctctgctgcagcaagaaggaaagaagctagcgcttatagcttgtcagc

SEQ ID NO: 300 - DNA, 972 bp, Zea mays
  source 1..972: mol_type = unassigned DNA
gagctccctttaatctggcgctagatctgcatccgcggcttgcaaagataaatggcacatttagtgtgttattttgcaatacctttcatagtagatatccttaaatgcagttttaggcatgtttgggtaattaaataacatttttaggaggagttttagatttacctttctttcgtgatgactgatgacagacgtggggaattcaaatgcaactctagcgaaagttcatatatttttcataaatagctgaggctggggtaattattttttgtagaaaaatagaataggtggaatggtttggggaaggcgtaggcgctcgtggacgacgccccataaaagacaagaggcggaattgccatgaattcgaggtagctaagtaaggcgcatatatatgccaaaaattctactgtcactttccaatttcaatgcgctgccaaacaagccgccgacccatggatactgacttgaattcagcccaattctgtagatccaaacagggccggcgtcagtgcctcaggtgagagagcagcagacgatgcaaagagccaaaagtggaagcagacgcagccgaagccgaagcccaagcccaaaactgttttgtctttgcccagaaccgcgacgagcctaaactgccgcttcctcctatctacaagtccctggcacatcacgcatagtccaaccatggcgcgcaggcgataaggcgcgccacggggacgcgacatgtggtggcggacgcgatcaggatagggccaggctggccgggcgcggccacgggagaacggtggccactcgtcccacatccgcttcgtcctgtcctgtactgcgtcctgcccccaacgagagccggagccggccatcccgtcgcacactctccccctctatatatgccgtcggtgtgggggagcctactacaggacgacccaagcaagcaagcaagcagcgagtacatacatactaggcagccaggcagtc

SEQ ID NO: 301 - DNA, 443 bp, Cassava vein mosaic virus
  source 1..443: mol_type = unassigned DNA
ccagaaggtaattatccaagatgtagcatcaagaatccaatgtttacgggaaaaactatggaagtattatgtgagctcagcaagaagcagatcaatatgcggcacatatgcaacctatgttcaaaaatgaagaatgtacagatacaagatcctatactgccagaatacgaagaagaatacgtagaaattgaaaaagaagaaccaggcgaagaaaagaatcttgaagacgtaagcactgacgacaacaatgaaaagaagaagataaggtcggtgattgtgaaagagacatagaggacacatgtaaggtggaaaatgtaagggcggaaagtaaccttatcacaaaggaatcttatcccccactacttatccttttatatttttccgtgtcatttttgcccttgagttttcctatataaggaaccaagttcggcatttgtgaaaac

SEQ ID NO: 302 - DNA, 1951 bp, Flaveria trinervia
  source 1..1951: mol_type = unassigned DNA
aagcttatgtttgttggtagtttttctttttgcattgtatatgatatctagaacatgaaaaaaggactcaccaggacaggagtattgcatctatgtttttattcgaatatttctcgttacacaatagaaaaacaaaacaaatccacggaaaggataatgagcttatacgtggacaatattgagactatatttctatggttgaaatcatgtgaatttatgagagctgtacttactcactaaaacaaacaaaaaactaaaacaaacaaaaaactgaaacaaacaaaatcctccataaaaagatgaatcgaacattttctttttgtcatgatacatatatatatatatatatatatatatatatgtatatgtatatatatatatatatgtatatatatatatacacacacacacacacatatatatatatatatatatatatgtatgtatgtatatatgtatatatatatgtgtgtgtgtgtgtgaatatgttgcatatatattgagaaatggaaattaagtacaataatattctctacatagaggcgttaatgcgtcaattttgtgtgttaaagacataatctaatacaacattgaagattttctatgaatttggaaagtatgtatacacaaaaattatgtaagagataaaagacttgtgtggaaatcaaatacctataaaataattgcaattgttacgaaagatgatttgtttatttatgtattaactttttacataaaatacctactaagtttgatttttaaaataaaattactcttaaattttagcagaataaccaggtaaactcataaacacatggtactgactttacactcacccattagctaagtgtgtttgtgatacaaccctatttcgtattatgtataaaactcacaaatctagttgtatgcattaggtgtgagatagccccagaaagttttatgagagggttgtatgtccaaaaactttatgatcatataggttttgtttttttgtttttttgtttttttgtttttttgtttttttttgttttttttgtttttttgttttgtttttttttgttttgttttttttgttttttttgttttttttgtttttttgtttttgtttttgcgtgtgcgtgtatgagagctagtgagggtaccaccgataaaaatgccactgaaatcgatattgaatataacgacctttgcaagaagagaattaagtatttatgagtacatacttttgaaggctttctcgtatttaatctttcgcaggtttaaaaatattaattatatattacaccccaatgcttttaaatctttacaacttaatccttataatttttcattttcaactttgatcccatatacttttttatattttataaaatttttatcttacttttcagtctaaattttacgagttaacaagcggcaacgtgcgcgtgtggcttcaatgtttctacgcatatttttccatttgacggccccgtcacaacgcacaagtcatagatagacctagctattattttttttaataatattttacgtttgtcatgggtgattcaacgtttttatgcataattttcatgttgatttatttatttttgttgtactttataatgcgagtatttccggtgttaatgatggatgatgttaaatgacatcgttttaatactaattgttttttaatttacaaaactctcaacaaatgattagttgggttagttattcataggaaagcggacgagcatgtcgttataattaaaaaaatatcaaaagagtaaacaaaaaaggaaaaagactaattatttagataataataatatccacaaaaatattcgaattcttcaatcctgagtttgctctgtggatgagtttctgtatcattgatacttgatacctgtaattcacacacctcatatctcatacttcatctataaatacccaattcattttgctcaaagtc

SEQ ID NO: 303 - DNA, 860 bp, Zea mays
  source 1..860: mol_type = unassigned DNA
ctggtaattattggctgtaggattataaacagagcctaaatagctggaatagctctagccctcaatccaaactaatgatatctatacttatgcaactctaaatttttattctaaaagtaatatttcatttttgtcaacgagattctctactctattccacaatcttttgaagcaatatttaccttaaatctgtactctataccaataatcatatattctattatttatttttatctctctcctaaggagcatccccctatgtctgcatggcccccgcctcgggtcccaatctcttgctctgctagtagcacagaagaaaacactagaaatgacttgcttgacttagagtatcagataaacatcatgtttacttaactttaatttgtatcggtttctactatttttataatatttttgtctctatagatactacgtgcaacagtataatcaacctagtttaatccagagcgaaggattttttactaagtacgtgactccatatgcacagcgttccttttatggttcctcactgggcacagcataaacgaaccctgtccaatgttttcagcgcgaacaaacagaaattccatcagcgaacaaacaacatacatgcgagatgaaaataaataataaaaaaagctccgtctcgataggccggcacgaatcgagagcctccatagccagttttttccatcggaacggcggttcgcgcacctaattatatgcaccacacgcctataaagccaaccaacccgtcggaggggcgcaagccagacagaagacagcccgtcagcccctctcgtttttcatccgccttcgcctccaaccgcgtgcgctccacgcctcctccaggaaagcga

SEQ ID NO: 304 - DNA, 1542 bp, Zea mays
  source 1..1542: mol_type = unassigned DNA
acgcttacgcttatgaatcagcttgattcgtaattggttctaacgagccttaatgcatggatgttggagagaaccaatatttatggaggaaataaagcatttaaatcagatttttttccatacatgttttccttatgaaatagatcgatgatttacactaaagttcatacccatttacgatgttttgcttaacgttttatgctgaaatccgcctgagctcacacgcacgatcggttccatatcttttgttccgatatatacggtaacttctagcttcatgggcgagctaatcacggtggtgtatggacccacctgaacgaaccaatgaaaaatttgttgccgctctcatgttatgcaagtctgaaccattaaatatgctagcataaacacgagtaggaaccaactacccgaccagcgaacacgacgttggcccaccttcgtccatcccaactcgaccccaccacgtgcgcaccttctgtttacgtaaaacataacatatgtttacacatgtataaacgtgccccacaatcgcgcggacgcacgtgccccactgacccgacctgaccacgcgtgtgaccactaccctggctaggacttcccatgcctatcggaagccctgagcttccattatcaacgcctatatatattattcaattgaagcaaaacatagtggttttttgtaagctgtataaaaatatttcattgttaaatcctgaggtataccaaaaaaaaggtgtttaaccaatggtttgaacaactttttttcatctttaaattacatttccaaaaatgatatttatttaatttattattattagattccactgaggagcaaaaacacatattcaagttaagaatgctgtattgagtcccccgttgtcggaaattaaaattatacttcatgtgatttataatttgctgtagtgcggcgcgcggctcttacgactgagctgaggccaaaataaagcagcaggttcgttgggggcgataatcccaggcggtgcactacaatttgaagtgtactaccctggcactctaaaagcatacacgcatgcaaaagcagctcccgctttttttgaatggagaagattatctcaatcgacaaatatatacgcgtaggacaatttatacactttagttatatatacatggccagaaaattgtcatctctaaagcaactacactgaaaaagaactttgcattttcacagtcccacaaaaaaaaaacaaaaaaaagttaaagagacatgtgcttgaagagcccctgcgcacttgtacacggtgacacaacatgcatgtacaccaaggcctgcctgcgcgccacctcgtcgtgctcgtgcctatataaagccactcgcatcccagcctatcattgcaagagtttgagacagcagaggacactcctcctcagaactctcccttccctcttgtaggggccaaaagggtcagagaactaggaagaagagaactagtccccaagcctaacaagaaagcaagatcttctgcaactgttggcattcgccttaatttgtatccatatccc

SEQ ID NO: 305 - DNA, 2015 bp, Zea mays
  source 1..2015: mol_type = unassigned DNA
ctaactaactagctagagtctacgtgtaagccaaacactctttaaacccgctttaccaatatattggagttgtttaatgataaaggtggaaaaccgaagctacaatttctgaagtgaatccttccaaacatggccttaattaaattgtttgggagtacggttttttttacgatttctagacaatgtcatgttttttagtaatattatagtattttatgttataaaaggtttcgttcaattcctaaaaactatgtttttaaaatcaagatattatagataccatgatatttttacagtattgaaaattttgctctactctaaagtcttcatgacatgactaacctttgccgaatactatggcctacaattttacatataaataattacagagaacaatattgtaaaaccgtatttttgagaaatattggtgccaaacagagccttgagttgagaagctgatacattcggttcggccctgcaattccagacagatggttctggttgcagctcaaattctttggctggaagaagggcgcacgtcgctgtctctgatgagcaggctttagttggatcaaggtcgctgttgctcggtttatatggtccagtctaaatccgtctactgcttctatgcccaaaaaaagatcgatccactctctcgtaggatttgtttttgggaaggaaaaaaaaacaattcatatgccttgagtggaaaaaaatcgaaatggaaatgaaaggcttgctaattatcaaaggacattagctaagctctgcacatcactctaagtctttacccctactagtactacctaaggtattaaaaaaggagaataaaaaccaaaagcaaaaaaagaagaagaagaaaacttgtggccagggttgctttggcagcgtaacgttaacgacggccacaagttggggtggggtgggtggtgtgggccccgccgcaggatctttctgggcctcgaagctggccgcgtgacgtggcgccgaaaaagcgcagcgagaaatacttgtggccacgctttttgcggccacggatattcttcttttctttccctgcacaagcacagcacagcacggtgcacttcctatattattttacttttctgttacaaaaaaagagaggaaatgctcttggaatttcttgtggacacgacacagctaggaatttatccttctttcttgttcgtttcctttttcttatctagtaacgagaaaaccgtccgggtttatccgcggaaaaaatatctgctatttgaacggccgcagatatttgcggtgttttctcttttattttctctacgctgcttcgtgccctattgtcaacacgtggaaaccttcctatccactccaatcacttcactccacttctcaaattttcagaacaaacttctaaatttataatgaggctcaatgaaatatttaatttcgatacaatgctatagataaacaaaaccaccctgagaaattggggaaaaaaaagagaaagagaccctctatctcaaaagggaaaacagaggggtcagaacgtaaaatatccgcagagggcggaggtgggccctcccctcccggggcctccccagccactcgatccctggcccttctcgaaatttccagccctgacaggcggggcccacggccgacgtggcccgcctcccctcccctcccttcgcccccagaaatctcgccgctcccacccctctccttcctctcgccatttccatttccttgcccttgccagccagagcgagactccaccgcttcctctccgccgcgtcctcctcccctccctccgttcctcacggctctccggactcgccccgcggctggccgtgctgagtttcgttctctggccggcaaagaagcgatttttttgtgctttctggacggatcccggccggagaagggaccgaatttccacgacctcgaccgccggctgctcctctgctgggctctccgtgcgcaagaagagcctaccaaggtgaatccggagatttcagctccgggcccgcccc

SEQ ID NO: 306 - DNA, 1739 bp, Zea mays
  source 1..1739: mol_type = unassigned DNA
aacaaaaattttgtgtatttgtcgtataaggattgcttccctttaaggtcatgttcctgcactgtaaagcaggcaaaggaaaaaaaagttatgaaggttaaaatgcatcatgggagcatcacctcattttgcacaaataacaaagaagctaaattttgctcccgaacaaacaacagcaatgctacggaatgcaactacctagcatttccaaaaatacagggccttccggtactgtattacaacttacaagcgatgaggccaagacgattagacgaatagctacagaacaagacaatgagagttcagcactcactttttgccagttccttctccttggcagcagccaggcgcttgagtttagcagcttgtgcaaatgtggacggcctacagcagacatacaggcaaagaagcgaggagtaatttgcagttggaaatcattcttcgatcaatagggaaactctgagtcacagcgaaaggaaggttaattgcctacgttgacaactgatcagcctccttgagaagttgcttgatttcaagccgcactttgatctgctcatcactaagtcctccgctctggatgacaaaagcacagaacgcatgagtggcaagtggaaacactagagcgaaataaatacaaaaccgcagactacaggctaacagatagggagaccgggaagacaaagactcgagcctgcattcaacagttacagtcgcctcggccaaaggttgagaaatttgcatcaaaatccaaactgtctagggccttgggaaatagttcctcggaatcagagttcaattcatggacgaaatagatggaactgatggtaggctactcttccgcccaatcacaattcacggaagatccaggtctcgagactaggagacggatgggaggcgcaacgcgcgatggggaggggggcggcgctgacctttctggcgaggtcgaggtagcggtagagcagctgcagcgcggacacgatgaggaagacgaagatagccgccagggacatggtcgccggcggcggcggagcgaggctgagccggtctctccggcctccgatcggcgttaagttggggatcgtaacgtgacgtgtctcctctccacagatcgacacaaccggcctactcgggtgcacgacgccgcgacaagggtgagatgtccgtgcacgcagcccgtttggagtcctcgttgcccacgaaccgaccccttacagaacaaggcctagcccaaaactattctgagttgagcttttgagcctagcccacctaagccgagcgtcatgaactgatgaacccactaccactagtcaaggcaaaccacaaccacaaatggatgaattgatctagaacaatccgaaggaggggaggccacgtcacactcacaccaaccgaaatatctgccagtatcagatcaaccggccaataggacgccagcgagcccaacacctagcgacgccgcaaaattcaccgcgaggggcaccgggcacggcaaaaacaaaagcccggcgcggtgagaatatctggcgactggcggagacctggtggccagcgcgcggccacatcagccaccccatccgcccacctcacctccggcgagccaatggcaactcgtcttaagattccacgagataaggacccgatcgccggcgacgctatttagccaggtgcgccccccacggtacactccaccagcggcatctatagcaaccggtccaacactttcacgctcagcttcagcc

SEQ ID NO: 307 - DNA, 92 bp, Zea mays
  source 1..92: mol_type = unassigned DNA
agatcaagtgcaaaggtccgccttgtttctcctctgtctcttgatctgactaatcttggtttatgattcgttgagtaattttggggaaagct

SEQ ID NO: 308 - DNA, 837 bp, Zea mays
  source 1..837: mol_type = unassigned DNA
atggactccagcagcttcctccctgccgccggcgcggagaatggctcggcggcgggcggcgccaacaatggcggcgctgctcagcagcatgcggcgccggcgatccgcgagcaggaccggctgatgccgatcgcgaacgtgatccgcatcatgcggcgcgtgctgccggcgcacgccaagattagcgacgacgccaaggagacgatccaggagtgcgtgtcggagtacatcagcttcatcacgggggaggccaacgagcggtgccagcgggagcagcgcaagaccatcaccgccgaggacgtgctgtgggccatgagccgcctcggcttcgacgactacgtcgagccgctcggcgcctacctccaccgctaccgcgagttcgagggcgacgcgcgcggcgtcgggctcgtccctggggccgccccatcgcgcggcggcgaccaccacccgcactccatgtcgccagcggcgatgctcaagtcccgcgggccagtctccggagccgccatgctaccgcaccaccaccaccaccacgacatgcagatgcacgccgccatgtacgggggaacggccgtgcccccgccggccgggcctcctcaccacggcgggttcctcatgccacacccacagggtagtagccactacctgccttacgcgtacgagcccacgtacggcggtgagcacgcgatggctgcatactatggaggcgccgcgtacgcgcccggcaacggcgggagcggcgacggcagtggcagtggcggcggtggcgggagcgcgtcgcacacaccgcagggcagcggcggcttggagcacccgcacccgttcgcgtacaagtag

SEQ ID NO: 309 - protein, 278 aa, Zea mays
MDSSSFLPAAGAENGSAAGGANNGGAAQQHAAPAIREQDRLMPIANVIRIMRRVLPAHAKISDDAKETIQECVSEYISFITGEANERCQREQRKTITAEDVLWAMSRLGFDDYVEPLGAYLHRYREFEGDARGVGLVPGAAPSRGGDHHPHSMSPAAMLKSRGPVSGAAMLPHHHHHHDMQMHAAMYGGTAVPPPAGPPHHGGFLMPHPQGSSHYLPYAYEPTYGGEHAMAAYYGGAAYAPGNGGSGDGSGSGGGGGSASHTPQGSGGLEHPHPFAYK

SEQ ID NO: 310 - DNA, 1117 bp, Zea mays
  source 1..1117: mol_type = unassigned DNA
aacaccaaggagaggattcgatgacgagtttgaggacgccattgctaggatgattaaccctaggctctggttccatgtagaaatcagaggcgcgatggaaataggtggaacgtcggtctccgctccagagatcacgacggcttcgtgtttgatatttctggtggcacaaaaacaaggcgcgagttacatatatatagatgagtatcgccagctttagttctattctaggaaaggataagttttacatggttacaattgatctatttctattaactgcctatagaacttagccggcaatatctcaaccatatttggaatacaacacatatatgttaacaatcagtctagcagctaggttgctgtgtggattcgtgaagcggcaaattcttggatggctgcaggtgcccgacatctttcgagcctccttgcaaattgctagtttttttcttgtttttcctctttgacttggtccgagtgtgctatgcagttgctgtgagagtgcaccttctgcttagtcgcatgatacaaggaactgttgattctaaaaaaaactttattttaatgtaaaggagagagaatttaatatcagttttttttcgatatagactttcatgtgattttgcatcgcccgatacatcagtgtgtttgtttggctttagtccatagcggcttctataacgttttgcctcgatagattacagctagctgcagcagttttaaaagccgtctttaatcggaagccaacatctcgacatatagagcgttcgataggatgcttacttattctagtctattaaatttcccaccgctgctaattaatgctaatgaattaactctctctgcctatccctcgacatgcactaatgtaggagtatatcccaacgcccaaccacctcctaataacttcgacggatggcagctaccgtccttggaagatggtgacggaatgtccagcattccaccgactgccagaaactgcacgcacatctgtcatcagcaatcgctagcctatttaatgagcaacattccattgcaatctcctcaggccacttacctgcagtcaccactcccaagccagtacccacagtcctacgagcagtcgcacgcaagtgtcaag

SEQ ID NO: 311 - DNA, 795 bp, Wheat dwarf virus
  source 1..795: mol_type = unassigned DNA
atggcctcttcatctgcacccaggttccgtgtctattccaagtacctctttctaacatatcctgaatgtacccttgagccacagtacgccttggattcacttcgcactctcttgaacaaatatgagcccctctacatcgctgctgttagagagctccacgaagatggatcaccacatctgcacgttctcgtgcagaacaagcttcgtgcttccatcaccaatcccaatgccttaaacctccgtatggatacatctccattctccatattccatccaaatatacaagctgccaaagactgcaaccaagttcgtgattacatcacgaaggaggttgactccgatgtaaacacagctgagtggggaacattcgtggctgtttcaactccaggtcgtaaagaccgtgatgcggatatgaaacagatcattgaatctagttcctctcgcgaggaattcctcagcatggtttgcaatcgttttccgtttgaatggtctatccgtctcaaagacttcgagtacacggcacgccatctatttcctgacccagttgccacttacacacctgagtttccaaccgaatcactcatttgccatgagaccattgaaagctggaaaaatgaacatctctactctctgtccctcgagagctacatcctgtgcaccagcacccctgccgaccaggcccagtccgacctcgaatggatggacgactacagccgtagtcaccggggaggcataagtccatctacatctgcgggccaaccagaacaggaaagacttcctgggcaaggtctctag

SEQ ID NO: 312 - protein, 264 aa, Wheat dwarf virus
MASSSAPRFRVYSKYLFLTYPECTLEPQYALDSLRTLLNKYEPLYIAAVRELHEDGSPHLHVLVQNKLRASITNPNALNLRMDTSPFSIFHPNIQAAKDCNQVRDYITKEVDSDVNTAEWGTFVAVSTPGRKDRDADMKQIIESSSSREEFLSMVCNRFPFEWSIRLKDFEYTARHLFPDPVATYTPEFPTESLICHETIESWKNEHLYSLSLESYILCTSTPADQAQSDLEWMDDYSRSHRGGISPSTSAGQPEQERLPGQGL

SEQ ID NO: 313 - DNA, 21 bp, Arabidopsis thaliana
  source 1..21: mol_type = unassigned DNA
tccacaaccaagcactcccat

SEQ ID NO: 314 - DNA, 1233 bp, Zea mays
  source 1..1233: mol_type = unassigned DNA
atgaggtccatggagagcacggactcgtcgtccggtgagctaccaccaccgcagaagcagccgagctcggcgccggatctcccgccgggcttccggttccaccccacggacgaggagctggtcgtccactacctcaagaagaaggccgcgtccgtgccactccccgtcgccatcatcgcggaggtcgacctctacaagttcgatccgtgggagctacctgataaggcgacattcggcgagcaggagtggtacttcttcagcccgagggaccgcaagtaccccaacggagcgcggccgaacagggcggcgacgtccggctactggaaggcgactggcacagacaagcccatcatggcgtccggcggcaaccgcgagaaggtcggcgtcaagaaggctctcgtgttctaccgcgggaagccgccaaagggcctcaagaccaactggatcatgcacgagtaccgcctcgcggatgcggcgagctcaaccaccagccggccgccgccgccttgcaacgccggaggcaaggccacgtctctcaggctcgacgactgggtgttatgccgcatctacaagaagatcgacaaacttggagtcggcgatccgccgcggatcatggagtgcggcgaggactccgtggagaatgcggtggcagcctacccgacgcatgccgcggctgctgccatggccgtcgcagtcgcaggcggaggaggggcttaccataccggcaattacacttcgctgatccaccaccatcacgaggacagcttcctggtggatgggctgctcacagcagaggacgcgggcggcagctccctgagccagctagccgcggcagccagggcagctgctccaacagacaccaccaagcagctcctcgtcccgtcctccaccaccccgttcaactggctcgacgcgtcggcactcacgattcttccgccggcaaagaggttccatgggtacaacagagacaccactgacggcggcggcacgtccctcccgtcgccgtccgagaggaataacctgcaggcggctgtcggcgccgtcgatagtggcgccagcggtggcactagtgccgtcattccatcatttctcaatccgctcggcgtgcaaggtgcgacaagctatcaccaccacgccattttcggcacaccggtgacgccggaagccgccgcggccgccgcatgcagtttccagcacccctaccagctgtccggcgtgaactggaacccgtaa

SEQ ID NO: 315 - protein, 410 aa, Zea mays
MRSMESTDSSSGELPPPQKQPSSAPDLPPGFRFHPTDEELVVHYLKKKAASVPLPVAIIAEVDLYKFDPWELPDKATFGEQEWYFFSPRDRKYPNGARPNRAATSGYWKATGTDKPIMASGGNREKVGVKKALVFYRGKPPKGLKTNWIMHEYRLADAASSTTSRPPPPCNAGGKATSLRLDDWVLCRIYKKIDKLGVGDPPRIMECGEDSVENAVAAYPTHAAAAAMAVAVAGGGGAYHTGNYTSLIHHHHEDSFLVDGLLTAEDAGGSSLSQLAAAARAAAPTDTTKQLLVPSSTTPFNWLDASALTILPPAKRFHGYNRDTTDGGGTSLPSPSERNNLQAAVGAVDSGASGGTSAVIPSFLNPLGVQGATSYHHHAIFGTPVTPEAAAAAACSFQHPYQLSGVNWNP

SEQ ID NO: 316 - DNA, 771 bp, synthetic construct
  misc_feature 1..771: note = Maize-optimized RKD4
  source 1..771: mol_type = other DNA
atgagcagcagcaagcacagcagcgtgttcaactacagcgccctgttcctgagcctgttcctgcagcagatggaccagaacagcctgcaccacctggacagcccgaagatcgagaacgagtacgagccggacagcctgtacgacatgctggacaagctgccgccgctggacagcctgctggacatggaggacctgaagccgaacgccggcctgcacttccagttccactacaacagcttcgaggacttcttcgagaacatcgaggtggacaacaccatcccgagcgacatccacctgctgacccaggagccgtacttcagcagcgacagcagcagcagcagcccgctggccatccagaacgacggcctgatcagcaacgtgaaggtggagaaggtgaccgtgaagaagaagaggaacctgaagaagaagaggcaggacaagctggagatgagcgagatcaagcagttcttcgacaggccgatcatgaaggccgccaaggagctgaacgtgggcctgaccgtgctgaagaagaggtgcagggagctgggcatctacaggtggccgcacaggaagctgaagagcctgaacagcctgatcaagaacctgaagaacgtgggcatggaggaggaggtgaagaacctggaggagcacaggttcctgatcgagcaggagccggacgccgagctgagcgacggcaccaagaagctgaggcaggcctgcttcaaggccaactacaagaggaggaagagcctgggcgacgactactactaa

SEQ ID NO: 317 - protein, 256 aa, Arabidopsis thaliana
MSSSKHSSVFNYSALFLSLFLQQMDQNSLHHLDSPKIENEYEPDSLYDMLDKLPPLDSLLDMEDLKPNAGLHFQFHYNSFEDFFENIEVDNTIPSDIHLLTQEPYFSSDSSSSSPLAIQNDGLISNVKVEKVTVKKKRNLKKKRQDKLEMSEIKQFFDRPIMKAAKELNVGLTVLKKRCRELGIYRWPHRKLKSLNSLIKNLKNVGMEEEVKNLEEHRFLIEQEPDAELSDGTKKLRQACFKANYKRRKSLGDDYY

SEQ ID NO: 318 - DNA, 1092 bp, synthetic construct
  misc_feature 1..1092: note = MO-LEC2
  source 1..1092: mol_type = other DNA
atggacaacttcctgccgttcccgagcagcaacgccaacagcgtgcaggagctgagcatggacccgaacaacaacaggagccacttcaccaccgtgccgacctacgaccaccaccaggcccagccgcaccacttcctgccgccgttcagctacccggtggagcagatggccgccgtgatgaacccgcagccggtgtacctgagcgagtgctacccgcagatcccggtgacccagaccggcagcgagttcggcagcctggtgggcaacccgtgcctgtggcaggagaggggcggcttcctggacccgaggatgaccaagatggccaggatcaacaggaagaacgccatgatgaggagcaggaacaacagcagcccgaacagcagcccgagcgagctggtggacagcaagaggcagctgatgatgctgaacctgaagaacaacgtgcagatcagcgacaagaaggacagctaccagcagagcaccttcgacaacaagaagctgagggtgctgtgcgagaaggagctgaagaacagcgacgtgggcagcctgggcaggatcgtgctgccgaagagggacgccgaggccaacctgccgaagctgagcgacaaggagggcatcgtggtgcagatgagggacgtgttcagcatgcagagctggagcttcaagtacaagttctggagcaacaacaagagcaggatgtacgtgctggagaacaccggcgagttcgtgaagcagaacggcgccgagatcggcgacttcctgaccatctacgaggacgagagcaagaacctgtacttcgccatgaacggcaacagcggcaagcagaacgagggcagggagaacgagagcagggagaggaaccactacgaggaggccatgctggactacatcccgagggacgaggaggaggccagcatcgccatgctgatcggcaacctgaacgaccactacccgatcccgaacgacctgatggacctgaccaccgacctgcagcaccaccaggccaccagcagcagcatgccgccggaggaccacgcctacgtgggcagcagcgacgaccaggtgagcttcaacgacttcgagtggtggtag

SEQ ID NO: 319 - protein, 363 aa, Arabidopsis thaliana
MDNFLPFPSSNANSVQELSMDPNNNRSHFTTVPTYDHHQAQPHHFLPPFSYPVEQMAAVMNPQPVYLSECYPQIPVTQTGSEFGSLVGNPCLWQERGGFLDPRMTKMARINRKNAMMRSRNNSSPNSSPSELVDSKRQLMMLNLKNNVQISDKKDSYQQSTFDNKKLRVLCEKELKNSDVGSLGRIVLPKRDAEANLPKLSDKEGIVVQMRDVFSMQSWSFKYKFWSNNKSRMYVLENTGEFVKQNGAEIGDFLTIYEDESKNLYFAMNGNSGKQNEGRENESRERNHYEEAMLDYIPRDEEEASIAMLIGNLNDHYPIPNDLMDLTTDLQHHQATSSSMPPEDHAYVGSSDDQVSFNDFEWW

SEQ ID NO: 320 - DNA, 639 bp, synthetic construct
  misc_feature 1..639: note = Maize-optimized RAP2.6L
  source 1..639: mol_type = other DNA
atggtgagcgccctgagcagggtgatcgagaacccgaccgacccgccggtgaagcaggagctggacaagagcgaccagcaccagccggaccaggaccagccgaggaggaggcactacaggggcgtgaggcagaggccgtggggcaagtgggccgccgagatcagggacccgaagaaggccgccagggtgtggctgggcaccttcgagaccgccgaggaggccgccctggcctacgacagggccgccctgaagttcaagggcaccaaggccaagctgaacttcccggagagggtgcagggcccgaccaccaccaccaccatcagccacgccccgaggggcgtgagcgagagcatgaacagcccgccgccgaggccgggcccgccgagcaccaccaccaccagctggccgatgacctacaaccaggacatcctgcagtacgcccagctgctgaccagcaacaacgaggtggacctgagctactacaccagcaccctgttcagccagccgttcagcaccccgagcagcagcagcagcagcagccagcagacccagcagcagcagctgcagcagcagcagcagcagagggaggaggaggagaagaactacggctacaactactacaactacccgagggagtag

SEQ ID NO: 321 - protein, 212 aa, Arabidopsis thaliana
MVSALSRVIENPTDPPVKQELDKSDQHQPDQDQPRRRHYRGVRQRPWGKWAAEIRDPKKAARVWLGTFETAEEAALAYDRAALKFKGTKAKLNFPERVQGPTTTTTISHAPRGVSESMNSPPPRPGPPSTTTTSWPMTYNQDILQYAQLLTSNNEVDLSYYTSTLFSQPFSTPSSSSSSSQQTQQQQLQQQQQQREEEEKNYGYNYYNYPRE

SEQ ID NO: 322 - DNA, 117 bp, Arabidopsis thaliana
  source 1..117: mol_type = unassigned DNA
caccttgctagttggatattacctcttctcttcaaagtatccttgaacgctcaccggttatcaaatctctacactatagctctgtagtcttgctagatagttagttctttagctctc

SEQ ID NO: 323 - DNA, 1542 bp, Zea mays
  source 1..1542: mol_type = unassigned DNA
atgattcacattgtggatcatgttgatttagatgcttggagtgtgcctgaggtccttagaccactttatgaatccccgaagattcttgcacagaaaacaactattgctgcactgcgtcacattaggcaaattgcgcatgaatctagtggggaaatgccctatggagggggccgacagccagcagttttgagaacatttagccagaggcttagcaggggtttcaatgatgctgtcaatgggtttccagatgacggttggtcactgatgagcagtgacggtgctgaggatgttactattgctatcaactcttctccaaacaaacttattggtcctcatgtcaactcttcccagctgtttactgcgatcggaggtggcatcctgtgtgctaaggcatcaatgctgcttcagaatgtgccacctgccctactagtacgatttctgagggagcatcgctccgaatgggctgatcctggtgttgatgcttattctgccgctgctcttagggctagtccatatgcagttcctggcttgcgtgctagtgggtttatgggcagccaggttattctgccgcttgcacataccttagagcacgaagagttcttggaggttattaggcttgagggacacagcctctgccatgacgaagttgttctgtcacgagatatgtatcttctgcagttgtgcagtggtgtggatgaaaatgcagctggtgcatgtgcacagcttgtgtttgcacccatcgatgaatcttttgccgacgatgcgccactgctaccctcaggcttccgtgtcattccactggatgcaaagacggatccaccatcaggcacacgcacacttgacctcgcatctaccctcgaggttggatctggtgggacaacgcgtgcttcgagtgacgcctccagcacctgcaacacaagatcagtgctgaccattgctttccagttctcatatgagaatcacctacgagagagcgtcgcagccatggccaggcaatacgtcaggactgtggtggcgtcggtgcagagggtagccatggcaatagctccttcgcgcattggtggacagcttgaaatgaagcaaactccaggatctcctgaggcacacacgctggcaaggtggatcggcaggagctacaggttccacactggagccgaactcctccgcacggacacccaatgcacggatgcttccttgaaagcgctgtggcaacactcggactcgatcatgtgctgttccctgaaggctgctcccgtgttcacctttgccaaccaagccggcctggacatgctggagacgacgctgattgcgctccaggacatctcccttgagaagatccttgatgacgatggcaggaaggcgctctgcaccgagtaccctaagattatgcaacagggcttcgcgtacctccccggtggcgtgtgtgtgtcgagcatggggcggccggtgtcgtacgagcaggcggtggcgtggaaggtcctgagcgacgacgacaccccgcactgccttgccttcatgttcgtgaactggtccttcgtgtga

SEQ ID NO: 324 - protein, 513 aa, Zea mays
MIHIVDHVDLDAWSVPEVLRPLYESPKILAQKTTIAALRHIRQIAHESSGEMPYGGGRQPAVLRTFSQRLSRGFNDAVNGFPDDGWSLMSSDGAEDVTIAINSSPNKLIGPHVNSSQLFTAIGGGILCAKASMLLQNVPPALLVRFLREHRSEWADPGVDAYSAAALRASPYAVPGLRASGFMGSQVILPLAHTLEHEEFLEVIRLEGHSLCHDEVVLSRDMYLLQLCSGVDENAAGACAQLVFAPIDESFADDAPLLPSGFRVIPLDAKTDPPSGTRTLDLASTLEVGSGGTTRASSDASSTCNTRSVLTIAFQFSYENHLRESVAAMARQYVRTVVASVQRVAMAIAPSRIGGQLEMKQTPGSPEAHTLARWIGRSYRFHTGAELLRTDTQCTDASLKALWQHSDSIMCCSLKAAPVFTFANQAGLDMLETTLIALQDISLEKILDDDGRKALCTEYPKIMQQGFAYLPGGVCVSSMGRPVSYEQAVAWKVLSDDDTPHCLAFMFVNWSFV

SEQ ID NO: 325 - DNA, 1080 bp, Zea mays
  source 1..1080: mol_type = unassigned DNA
atggaggagatcacccaacactttggagttggcgcaagcagccacggccatggccacggccagcaccaccatcatcaccaccaccaccacccgtgggcatcctccctcagcgccgtcgtagcgccgctgccgccgcaaccgccaagcgcaggcctgccgctgaccctgaacacggtggcggccactgggaacagcggcggtagcggcaacccggtgctgcagcttgccaacggtggcggcctcctcgacgcatgcgtcaaggcgaaggagccctcgtcgtcgtctccctacgcaggcgacgtcgaggccatcaaggccaagatcatctcgcacccacactactactcgctcctcactgcctacctcgagtgcaacaaggtgggggcaccaccggaggtgtcggcgaggctgacggagatagcgcaggaggtggaggcgcggcagcgcacggcgctcggcggcctggccgctgcgacggagccggagctggaccagttcatggaggcgtaccacgagatgctggtgaagttcagggaggagctgacgaggccgctgcaggaggcgatggagttcatgcgaagggtggagtcgcagctgaactcgctttccatctccggaaggtcgctgcgcaacatcctttcatctggctcttctgaggaggatcaagaaggtagcggaggagagaccgagctccctgaagttgatgcacatggtgtggaccaagagctgaagcaccatctcctgaagaaatacagtggctatctaagctcgctcaagcaagaactgtcaaagaagaagaagaaagggaagctccccaaggaggctcgccagcagctccttagctggtgggatcagcactacaaatggccttacccctcagagactcagaaggtggcactggctgagtctaccgggcttgacctgaagcagatcaacaactggttcatcaaccagcggaagcggcactggaagccatccgaggagatgcaccacctgatgatggacgggtaccacaccaccaatgccttctacatggacggccacttcatcaacgacggcgggctgtaccggctcggctag

SEQ ID NO: 326 - protein, 359 aa, Zea mays
MEEITQHFGVGASSHGHGHGQHHHHHHHHHPWASSLSAVVAPLPPQPPSAGLPLTLNTVAATGNSGGSGNPVLQLANGGGLLDACVKAKEPSSSSPYAGDVEAIKAKIISHPHYYSLLTAYLECNKVGAPPEVSARLTEIAQEVEARQRTALGGLAAATEPELDQFMEAYHEMLVKFREELTRPLQEAMEFMRRVESQLNSLSISGRSLRNILSSGSSEEDQEGSGGETELPEVDAHGVDQELKHHLLKKYSGYLSSLKQELSKKKKKGKLPKEARQQLLSWWDQHYKWPYPSETQKVALAESTGLDLKQINNWFINQRKRHWKPSEEMHHLMMDGYHTTNAFYMDGHFINDGGLYRLG

SEQ ID NO: 327 - DNA, 500 bp, Arabidopsis thaliana
  source 1..500: mol_type = unassigned DNA
ttcaaagccaatgactgttgttaggtccagtttctaaggacgaatcatccaatcactggttctttctgaacaaaacaaagagctatagagttacgttactgtagccgagacagagcctgcaatctggttatgccacatactaggttctttcttaaagttgactcactctatcctaagttctacttacaaggagctacaacaaattggtcataaccggagagcgttcaaggaggtaatatcccatcttactctgtagcaaggctacaaaaggagagctaaagaactaggctacaaaaagagagctaaagaactaactatctagcaagactacagagctatagtgtagagatttcataaccggtgagcgttcaaggatactttgaagagaagaggtaatatctcaactagcaagactacaaaaaaatggagatataaaactaactgtctaacaagactacagagctatagtagagatagatacgttcgacacttaagcatga

SEQ ID NO: 328 - DNA, 1068 bp, Zea mays
  source 1..1068: mol_type = unassigned DNA
atggcgcccagcagctacgaggtggcggcttccatcctcctctgcgccgaggacagcagcagcatcctggacctcgaagcggaggccgaggaggaagcgctactggcgcggagcggggagcccggcggcggcgcggagttccccgtgccgtccgaggaatgcgtcgccggtttcctggagtctgaggcagcgcacatgccgcgggaggactacgccgagaggctgcgcagcggggggatggatctccgcgtccggacggacgccatcgactggatttggaaggttcacacgtgctacggtttcggccctctcactgcctgcttggccgtcaactacctggaccgcttcctctcgctctaccagcttccggaaggcaaggcttggatgacacagctgctgtccgtggcgtgcttgtccctggccgccaagatggaggagacctacgtcccttcgtccctggacctgcaggccggggacgcgcggtacgtgttcgaggcgaagacgatccagaggatggagctcctggtcctcagcacgctcaagtggaggatgcaagcggtcacccccttgtcgtacgtcgactacttcctccaccggctccgaggcggcgccgcgccgagcagacgcgccgtcctccgatccgcggagctcatcctgtgcatcgccagagggacgcactgcttggatttcaggccctcggagatcgccttggccgtcgccgccaccgtggccggcgaagagcgcgccgtggacatcgacagggccttcacccaccgtgtacataaggagagggtgtcgcgatgcctcgaagcgatccagcaggccaccgccaccatggccctgccgcagccgctgaaaagtgaaggcccgagcagcagcggccgcagggcctcgtcttcctcggccaccgtgccgcggagccccaccggggtgctggacgctggctgcctgagctacaggagagccgccgccgccgccgcctcgcacgcgagctccagctggcgcgacgaggacgacgacgactgccccccggctgtctgcagcaagaggaggaagattagcagatga

SEQ ID NO: 329 - protein, 355 aa, Zea mays
MAPSSYEVAASILLCAEDSSSILDLEAEAEEEALLARSGEPGGGAEFPVPSEECVAGFLESEAAHMPREDYAERLRSGGMDLRVRTDAIDWIWKVHTCYGFGPLTACLAVNYLDRFLSLYQLPEGKAWMTQLLSVACLSLAAKMEETYVPSSLDLQAGDARYVFEAKTIQRMELLVLSTLKWRMQAVTPLSYVDYFLHRLRGGAAPSRRAVLRSAELILCIARGTHCLDFRPSEIALAVAATVAGEERAVDIDRAFTHRVHKERVSRCLEAIQQATATMALPQPLKSEGPSSSGRRASSSSATVPRSPTGVLDAGCLSYRRAAAAAASHASSSWRDEDDDDCPPAVCSKRRKISR

SEQ ID NO: 330 - DNA, 1998 bp, Zea mays
  source 1..1998: mol_type = unassigned DNA
ttcacaaactcaatacaacacacagtggagtagggtattacgctccggcggcccgaaccactctaaatccttgtgtcctcgtgtgctcttccaccattaatgactgtaattgcagggacacgaagagttgtagcgcttttgccaacaagatccgctatatgctagtagagtggaacctgcacagcaacaagcatccaataatctgagaataagaattatgtgtggtgatggttctcatctctgcaactcgccattttcgcgagagaaccaaatccaagttggtgaagatcatgatttgggctcatgggctggcatagtagctattacctttgcaattgtggttcgaatctatccgatattctccttttcagggagagctaatgcttatgcttattgggtattttggtttgacactgcttcacgcccaaaaaaaggcaactatgtctgagttggatatggcccaaaaaaaggcagctatgtctgagttggatatggaagtcttctttcgtttagggtgaagtaagaccaagctcatgagcttattatcttaggtcggaacaaattagttgataggcatggcacatttatcaaattataatgattttaacagaaaagcaacacctctttttcagcagcaccagctttgcaagctgcaattgacactccaagcatagtatttgctccaaactcagcctgcatttcgcacaatatcatatctatttccatttggataaaatatattttccagaaatatgggaacagaatcaagatacagaaaaaagttgtggtagtagtggtaagtggaaacacaagtacagtgaaaagatagcattatttctgaacagtcaaattaaccgaaataagtagtatcacatactgcccctaaattgactacacccaatgtaaagaattgcttgagcatattgagccatcagttgtttgtttgtgtaacggatttgacaatgcagagttcaggagcaaaaaaccgcaaaggagagaaagagggaaaggatctcctagtatcccaccttgtggcgcgccctgtcaagtgcatgatggcctggtcgatctgcgtctgctgctgcggttccatcccaacgagtgcctccgacaccttgtcgttgatcacccgcaccgcgtaggcgacccccctggcgaggaacttccgcctctcggaggccccggccgcgtcggcggcggcgccctcgagcgcgcccacgctagccgtagatgctcggtgcacggccttgttggtgtgcaactcgacctcaacggccggtgcgctacgcccgtcaaggatctggcgcgcccgcaccctcgtgatcacggtgggcgcctcccgcctcatgtggccgacgatgaaaagcgccgggttaggggccttggcgcgcaccgccgtattcagggcctcctcgctcttgcgcgagagcaggtgcttccccaggtactcctgcactgacaaggctgccacagcggtggaatttgtcctcacgacttcgccacgtcgtcctcacctccctggcttcccacgactccgccgtatcgaggtgctcggtgggtcgtcttaatccgaagtccgaactaggaagacgagacagagaggtctgaggaatgggcctcgtttgatgttgagctgaattatttttccagcataagcccaggtcttggtccatgaacaaaattactagaaacccagcccagtactacgatctaaaagagggactgccactggatagctctctctagcattctccacgctccaatacagcggcgtcgtgtctatccgggtctatccgcgaacacgtgagaactctccagaaactgctttctcctccacttcatctctctcgctttccctctataaaaagaccccttctaggaattgagggagacagcaagcaccaagcagcgatccgaagctcaatcaattcactcaaacctcttccccaaatcttcgattagatcttcgttgacaagaagactagaaccgaacctgac

SEQ ID NO: 331 - DNA, 508 bp, Zea mays
  source 1..508: mol_type = unassigned DNA
ctatagtattttaaaattgcattaacaaacatgtcctaattggtactcctgagatactataccctcctgttttaaaatagttggcattatcgaattatcattttactttttaatgttttctcttcttttaatatattttatgaattttaatgtattttaaaatgttatgcagttcgctctggacttttctgctgcgcctacacttgggtgtactgggcctaaattcagcctgaccgaccgcctgcattgaataatggatgagcaccggtaaaatccgcgtacccaactttcgagaagaaccgagacgtggcgggccgggccaccgacgcacggcaccagcgactgcacacgtcccgccggcgtacgtgtacgtgctgttccctcactggccgcccaatccactcatgcatgcccacgtacacccctgccgtggcgcgcccagatcctaatcctttcgccgttctgcacttctgctgcctataaatggcggcatcgaccgtcacctgct

SEQ ID NO: 332 - DNA, 1435 bp, Zea mays
  source 1..1435: mol_type = unassigned DNA
gagagcttgccgagtgccatccttggacactcgataaagtatattttattttttttattttgccaaccaaactttttgtggtatgttcctacactatgtagatctacatgtaccattttggcacaattacatatttacaaaaatgttttctataaatattagatttagttcgtttatttgaatttcttcggaaaattcacatttaaactgcaagtcactcgaaacatggaaaaccgtgcatgcaaaataaatgatatgcatgttatctagcacaagttacgaccgatttcagaagcagaccagaatcttcaagcaccatgctcactaaacatgaccgtgaacttgttatctagttgtttaaaaattgtataaaacacaaataaagtcagaaattaatgaaacttgtccacatgtcatgatatcatatatagaggttgtgataaaaatttgataatgtttcggtaaagttgtgacgtactatgtgtagaaacctaagtgacctacacataaaatcatagagtttcaatgtagttcactcgacaaagactttgtcaagtgtccgataaaaagtactcgacaaagaagccgttgtcgatgtactgttcgtcgagatctctttgtcgagtgtcacactaggcaaagtctttacggagtgtttttcaggctttgacactcggcaaagcgctcgattccagtagtgacagtaatttgcatcaaaaatagctgagagatttaggccccgtttcaatctcacgggataaagtttagcttcctgctaaactttagctatatgaattgaagtgctaaagtttagtttcaattaccaccattagctctcctgtttagattacaaatggctaaaagtagctaaaaaatagctgctaaagtttatctcgcgagattgaaacagggccttaaaatgagtcaactaatagaccaactaattattagctattagtcgttagcttctttaatctaagctaaaaccaactaatagcttatttgttgaattacaattagctcaacggaattctctgtttttctaaaaaaaaactgcccctctcttacagcaaattgtccgctgcccgtcgtccagatacaatgaacgtacctagtaggaactcttttacacgctcggtcgctcgccgcggatcggagtccccggaacacgacaccactgtggaacacgacaaagtctgctcagaggcggccacaccctggcgtgcaccgagccggagcccggataagcacggtaaggagagtacggcgggacgtggcgacccgtgtgtctgctgccacgcagccttcctccacgtagccgcgcggccgcgccacgtaccagggcccggcgctggtataaatcccgcgccacctccgctttagttctgcatacagccaacccaaggatccaacacacacccgaggatatcacagt

SEQ ID NO: 333 - DNA, 896 bp, Zea mays
  source 1..896: mol_type = unassigned DNA
gtgcagcgtgacccggtcgtgcccctctctagagataatgagcattgcatgtctaagttataaaaaattaccacatattttttttgtcacacttgtttgaagtgcagtttatctatctttatacatatatttaaactttactctacgaataatataatctatagtactacaataatatcagtgttttagagaatcatataaatgaacagttagacatggtctaaaggacaattgagtattttgacaacaggactctacagttttatctttttagtgtgcatgtgttctcctttttttttgcaaatagcttcacctatataatacttcatccattttattagtacatccatttagggtttagggttaatggtttttatagactaatttttttagtacatctattttattctattttagcctctaaattaagaaaactaaaactctattttagtttttttatttaataatttagatataaaatagaataaaataaagtgactaaaaattaaacaaataccctttaagaaattaaaaaaactaaggaaacatttttcttgtttcgagtagataatgccagcctgttaaacgccgtcgacgagtctaacggacaccaaccagcgaaccagcagcgtcgcgtcgggccaagcgaagcagacggcacggcatctctgtcgctgcctctggacccctctcgagagttccgctccaccgttggacttgctccgctgtcggcatccagaaattgcgtggcggagcggcagacgtgagccggcacggcaggcggcctcctcctcctctcacggcaccggcagctacgggggattcctttcccaccgctccttcgctttcccttcctcgcccgccgtaataaatagacaccccctccacaccctctt

SEQ ID NO: 334 - DNA, 82 bp, Zea mays
  source 1..82: mol_type = unassigned DNA
tccccaacctcgtgttgttcggagcgcacacacacacaaccagatctcccccaaatccacccgtcggcacctccgcttcaag

SEQ ID NO: 335 - DNA, 1010 bp, Zea mays
  source 1..1010: mol_type = unassigned DNA
gtacgccgctcgtcctccccccccccccctctctaccttctctagatcggcgttccggtccatggttagggcccggtagttctacttctgttcatgtttgtgttagatccgtgtttgtgttagatccgtgctgctagcgttcgtacacggatgcgacctgtacgtcagacacgttctgattgctaacttgccagtgtttctctttggggaatcctgggatggctctagccgttccgcagacgggatcgatttcatgattttttttgtttcgttgcatagggtttggtttgcccttttcctttatttcaatatatgccgtgcacttgtttgtcgggtcatcttttcatgcttttttttgtcttggttgtgatgatgtggtctggttgggcggtcgttctagatcggagtagaattctgtttcaaactacctggtggatttattaattttggatctgtatgtgtgtgccatacatattcatagttacgaattgaagatgatggatggaaatatcgatctaggataggtatacatgttgatgcgggttttactgatgcatatacagagatgctttttgttcgcttggttgtgatgatgtggtgtggttgggcggtcgttcattcgttctagatcggagtagaatactgtttcaaactacctggtgtatttattaattttggaactgtatgtgtgtgtcatacatcttcatagttacgagtttaagatggatggaaatatcgatctaggataggtatacatgttgatgtgggttttactgatgcatatacatgatggcatatgcagcatctattcatatgctctaaccttgagtacctatctattataataaacaagtatgttttataattattttgatcttgatatacttggatgatggcatatgcagcagctatatgtggatttttttagccctgccttcatacgctatttatttgcttggtactgtttcttttgtcgatgctcaccctgttgtttggtgttacttctgcag

SEQ ID NO: 336 - DNA, 202 bp, Figwort mosaic virus
  source 1..202: mol_type = unassigned DNA
atcgagcagctggcttgtggggaccagacaaaaaaggaatggtgcagaattgttaggcgcacctaccaaaagcatctttgcctttattgcaaagataaagcagattcctctagtacaagtggggaacaaaataacgtggaaaagagctgtcctgacagcccactcactaatgcgtatgacgaacgcagtgacgaccacaaaa

SEQ ID NO: 337 - DNA, 184 bp, peanut chlorotic streak caulimovirus
  source 1..184: mol_type = unassigned DNA
caacgagatcatgagccaatcaaagaggagtgatgtagacctaaagcaataatggagccatgacgtaagggcttacgcccatacgaaataattaaaggctgatgtgacctgtcggtctctcagaacctttactttttatgtttggcgtgtatttttaaatttccacggcaatgacgatgtgacc

SEQ ID NO: 338 - DNA, 187 bp, Mirabilis mosaic virus
  source 1..187: mol_type = unassigned DNA
ccactaaaacattgctttgtcaaaagctaaaaaagatgatgcccgacagccacttgtgtgaagcatgagaagccggtccctccactaagaaaattagtgaagcatcttccagtggtccctccactcacagctcaatcagtgagcaacaggacgaaggaaatgacgtaagccatgacgtctaatccca

SEQ ID NO: 339 - DNA, 1988 bp, Zea mays
  source 1..1988: mol_type = unassigned DNA
gtgcagcgtgacccggtcgtgcccctctctagagataatgagcattgcatgtctaagttataaaaaattaccacatattttttttgtcacacttgtttgaagtgcagtttatctatctttatacatatatttaaactttactctacgaataatataatctatagtactacaataatatcagtgttttagagaatcatataaatgaacagttagacatggtctaaaggacaattgagtattttgacaacaggactctacagttttatctttttagtgtgcatgtgttctcctttttttttgcaaatagcttcacctatataatacttcatccattttattagtacatccatttagggtttagggttaatggtttttatagactaatttttttagtacatctattttattctattttagcctctaaattaagaaaactaaaactctattttagtttttttatttaataatttagatataaaatagaataaaataaagtgactaaaaattaaacaaataccctttaagaaattaaaaaaactaaggaaacatttttcttgtttcgagtagataatgccagcctgttaaacgccgtcgacgagtctaacggacaccaaccagcgaaccagcagcgtcgcgtcgggccaagcgaagcagacggcacggcatctctgtcgctgcctctggacccctctcgagagttccgctccaccgttggacttgctccgctgtcggcatccagaaattgcgtggcggagcggcagacgtgagccggcacggcaggcggcctcctcctcctctcacggcaccggcagctacgggggattcctttcccaccgctccttcgctttcccttcctcgcccgccgtaataaatagacaccccctccacaccctctttccccaacctcgtgttgttcggagcgcacacacacacaaccagatctcccccaaatccacccgtcggcacctccgcttcaaggtacgccgctcgtcctccccccccccccctctctaccttctctagatcggcgttccggtccatggttagggcccggtagttctacttctgttcatgtttgtgttagatccgtgtttgtgttagatccgtgctgctagcgttcgtacacggatgcgacctgtacgtcagacacgttctgattgctaacttgccagtgtttctctttggggaatcctgggatggctctagccgttccgcagacgggatcgatttcatgattttttttgtttcgttgcatagggtttggtttgcccttttcctttatttcaatatatgccgtgcacttgtttgtcgggtcatcttttcatgcttttttttgtcttggttgtgatgatgtggtctggttgggcggtcgttctagatcggagtagaattctgtttcaaactacctggtggatttattaattttggatctgtatgtgtgtgccatacatattcatagttacgaattgaagatgatggatggaaatatcgatctaggataggtatacatgttgatgcgggttttactgatgcatatacagagatgctttttgttcgcttggttgtgatgatgtggtgtggttgggcggtcgttcattcgttctagatcggagtagaatactgtttcaaactacctggtgtatttattaattttggaactgtatgtgtgtgtcatacatcttcatagttacgagtttaagatggatggaaatatcgatctaggataggtatacatgttgatgtgggttttactgatgcatatacatgatggcatatgcagcatctattcatatgctctaaccttgagtacctatctattataataaacaagtatgttttataattattttgatcttgatatacttggatgatggcatatgcagcagctatatgtggatttttttagccctgccttcatacgctatttatttgcttggtactgtttcttttgtcgatgctcaccctgttgtttggtgttacttctgcag

SEQ ID NO: 340 - DNA, 573 bp, synthetic construct
  misc_feature 1..573: note = 3xENH
  source 1..573: mol_type = other DNA
atcgagcagctggcttgtggggaccagacaaaaaaggaatggtgcagaattgttaggcgcacctaccaaaagcatctttgcctttattgcaaagataaagcagattcctctagtacaagtggggaacaaaataacgtggaaaagagctgtcctgacagcccactcactaatgcgtatgacgaacgcagtgacgaccacaaaacaacgagatcatgagccaatcaaagaggagtgatgtagacctaaagcaataatggagccatgacgtaagggcttacgcccatacgaaataattaaaggctgatgtgacctgtcggtctctcagaacctttactttttatgtttggcgtgtatttttaaatttccacggcaatgacgatgtgaccccactaaaacattgctttgtcaaaagctaaaaaagatgatgcccgacagccacttgtgtgaagcatgagaagccggtccctccactaagaaaattagtgaagcatcttccagtggtccctccactcacagctcaatcagtgagcaacaggacgaaggaaatgacgtaagccatgacgtctaatccca

SEQ ID NO: 341 - DNA, 5020 bp, synthetic construct
  misc_feature 1..5020: note = PHP40828
  source 1..5020: mol_type = other DNA
ctcgactctagaggatcgctcaggaaggccgctgagatagaggcatggcggccaatgcgggcggcggtggagcgggaggaggcagcggcagcggcagcgtggctgcgccggcggtgtgccgccccagcggctcgcggtggacgccgacgccggagcagatcaggatgctgaaggagctctactacggctgcggcatccggtcgcccagctcggagcagatccagcgcatcaccgccatgctgcggcagcacggcaagatcgagggcaagaacgtcttctactggttccagaaccacaaggcccgcgagcgccagaagcgccgcctcaccagcctcgacgtcaacgtgcccgccgccggcgcggccgacgccaccaccagccaactcggcgtcctctcgctgtcgtcgccgccgccttcaggcgcggcgcctccctcgcccaccctcggcttctacgccgccggcaatggcggcggatcggctgtgctgctggacacgagttccgactggggcagcagcggcgctgccatggccaccgagacatgcttcctgcaggactacatgggcgtgacggacacgggcagctcgtcgcagtggccacgcttctcgtcgtcggacacgataatggcggcggccgcggcgcgggcggcgacgacgcgggcgcccgagacgctccctctcttcccgacctgcggcgacgacggcggcagcggtagcagcagctacttgccgttctggggtgccgcgtccacaactgccggcgccacttcttccgttgcgatccagcagcaacaccagctgcaggagcagtacagcttttacagcaacagcaacagcacccagctggccggcaccggcaaccaagacgtatcggcaacagcagcagcagccgccgccctggagctgagcctcagctcatggtgctccccttaccctgctgcagggagtatgtgagagcaacgcgagctgccactgctcttcactgatgtctctggaatggaaggaggaggaagtgagcatagcgttggtgcgttgctgtcaagggcgaattcacatggttaacctagacttgtccatcttctggattggccaacttaattaatgtatgaaataaaaggatgcacacatagtgacatgctaatcactataatgtgggcatcaaagttgtgtgttatgtgtaattactagttatctgaataaaagagaaagagatcatccatatttcttatcctaaatgaatgtcacgtgtctttataattctttgatgaaccagatgcatttcattaaccaaatccatatacatataaatattaatcatatataattaatatcaattgggttagcaaaacaaatctagtctaggtgtgttttgcgaatgcggccgccaccgcggtggagctcgaattccggtccgggtcacccagcttgagtattctatagtgtcacctaaatagcttggcgtaatcatggtcatagctgtttcctgtgtgaaattgttatccgctcacaattccacacaacatacgagccggaagcataaagtgtaaagcctggggtgcctaatgagtgagctaactcacattaattgcgttgcgctcactgcccgctttccagtcgggaaacctgtcgtgccagctgcattaatgaatcggccaacgcgcggggagaggcggtttgcgtattgggcgctcttccgcttcctcgctcactgactcgctgcgctcggtcgttcggctgcggcgagcggtatcagctcactcaaaggcggtaatacggttatccacagaatcaggggataacgcaggaaagaacatgtgagcaaaaggccagcaaaaggccaggaaccgtaaaaaggccgcgttgctggcgtttttccataggctccgcccccctgacgagcatcacaaaaatcgacgctcaagtcagaggtggcgaaacccgacaggactataaagataccaggcgtttccccctggaagctccctcgtgcgctctcctgttccgaccctgccgcttaccggatacctgtccgcctttctcccttcgggaagcgtggcgctttctcatagctcacgctgtaggtatctcagttcggtgtaggtcgttcgctccaagctgggctgtgtgcacgaaccccccgttcagcccgaccgctgcgccttatccggtaactatcgtcttgagtccaacccggtaagacacgacttatcgccactggcagcagccactggtaacaggattagcagagcgaggtatgtaggcggtgctacagagttcttgaagtggtggcctaactacggctacactagaagaacagtatttggtatctgcgctctgctgaagccagttaccttcggaaaaagagttggtagctcttgatccggcaaacaaaccaccgctggtagcggtggtttttttgtttgcaagcagcagattacgcgcagaaaaaaaggatctcaagaagatcctttgatcttttctacggggtctgacgctcagtggaacgaaaactcacgttaagggattttggtcatggagccacgttgtgtctcaaaatctctgatgttacattgcacaagataaaaatatatcatcatgaacaataaaactgtctgcttacataaacagtaatacaaggggtgttatgagccatattcaacgggaaacgtcttgctcgaggccgcgattaaattccaacatggatgctgatttatatgggtataaatgggctcgcgataatgtcgggcaatcaggtgcgacaatctatcgattgtatgggaagcccgatgcgccagagttgtttctgaaacatggcaaaggtagcgttgccaatgatgttacagatgagatggtcagactaaactggctgacggaatttatgcctcttccgaccatcaagcattttatccgtactcctgatgatgcatggttactcaccactgcgatccccggaaaaacagcattccaggtattagaagaatatcctgattcaggtgaaaatattgttgatgcgctggcagtgttcctgcgccggttgcattcgattcctgtttgtaattgtccttttaacagcgatcgcgtatttcgtctcgctcaggcgcaatcacgaatgaataacggtttggttgatgcgagtgattttgatgacgagcgtaatggctggcctgttgaacaagtctggaaagaaatgcataaacttttgccattctcaccggattcagtcgtcactcatggtgatttctcacttgataaccttatttttgacgaggggaaattaataggttgtattgatgttggacgagtcggaatcgcagaccgataccaggatcttgccatcctatggaactgcctcggtgagttttctccttcattacagaaacggctttttcagaaatatggtattgataatcctgatatgaataaattgcagtttcatttgatgctcgatgagtttttctaatcagaattggttaattggttgtaacactggcagagcattacgctgacttgacgggacggcggctttgttgaataaatcgaacttttgctgagttgaaggatcagatcacgcatcttcccgacaacgcagaccgttccgtggcaaagcaaaagttcaaaatcaccaactggtccacctacaacaaagctctcatcaaccgtggctccctcactttctggctggatgatggggcgattcaggcctggtatgagtcagcaacaccttcttcacgagccatgacattaacctataaaaataggcgtatcacgaggccctttcgtctcgcgcgtttcggtgatgacggtgaaaacctctgacacatgcagctcccggagacggtcacagcttgtctgtaagcggatgccgggagcagacaagcccgtcagggcgcgtcagcgggtgttggcgggtgtcggggctggcttaactatgcggcatcagagcagattgtactgagagtgcaccatatgcggtgtgaaataccgcacagatgcgtaaggagaaaataccgcatcaggaaattgtaagcgttaatattttgttaaaattcgcgttaaatttttgttaaatcagctcattttttaaccaataggccgaaatcggcaaaatcccttataaatcaaaagaatagaccgagatagggttgagtgttgttccagtttggaacaagagtccactattaaagaacgtggactccaacgtcaaagggcgaaaaaccgtctatcagggcgatggcccactacgtgaaccatcaccctaatcaagttttttggggtcgaggtgccgtaaagcactaaatcggaaccctaaagggagcccccgatttagagcttgacggggaaagccggcgaacgtggcgagaaaggaagggaagaaagcgaaaggagcgggcgctagggcgctggcaagtgtagcggtcacgctgcgcgtaaccaccacacccgccgcgcttaatgcgccgctacagggcgcgtccattcgccattcaggctgcgcaactgttgggaagggcgatcggtgcgggcctcttcgctattacgccagctggcgaaagggggatgtgctgcaaggcgattaagttgggtaacgccagggttttcccagtcacgacgttgtaaaacgacggccagtgaattgtaatacgactcactatagggcgaattgggttacccggaccgaagcttgcggccgcacactgatagtttaaactgaaggcgggaaacgacaatctgatcatgagcggagaattaagggagtcacgttatgacccccgccgatgacgcgggacaagccgttttacgtttggaactgacagaaccgcaacgttgaaggagccactcagccgcgggtttctggagtttaatgagctaagcacatacgtcagaaaccattattgcgcgttcaaaagtcgcctaaggtcactatcagctagcaaatatttcttgtcaaaaatgctccactgacgttccataaattcccctcggtatccaattagagtctcatattcactctcccgggggat

SEQ ID NO: 342 - DNA, 15423 bp, synthetic construct
  misc_feature 1..15423: note = PHP100712
  source 1..15423: mol_type = other DNA
gtttacccgccaatatatcctgtcaaacactgcggccgcacttgaccgcggatggagccggagctgtggtgaggccatcgacgggaggtgggggagaacacagtctcagtgttctttgtgagtccgcaaggtttttagcttttctgtattaattaaggttgctgttggctgtagaatacggtcgtggaagagctgtatcggtagctactacgtaagctattatatactggaagtctggagctcgtcgatctccggtcgtcttcctccatttctcctcgtcttgctttgactgctgctaccatttgcttctgttttctgatgaagcatgccatgtcggccaccagtgtttgtgtggtttttgcagggaatggctttcaagtgctgtgattgaatggccctcgtcgtcctcggctgagctcacatggacgcgtcatgtgagtgagatatatgatcatatgatgagtggggttcgggtgagtgcgtacttgaagtaggatcccgctttcactcattcattcattggcctttaaaccgggaaattttcgcgaggagatggagggaagcaagcagggtgacgagtgcagagtgccgcgagcgctttgtcaaaaggcaccgccgtaggcaaaaaaatcaatggccctgactgactcgatggtagtactactgtagagactagagagggttgctccccatatcttcgtgtgacttttactccagcattgcatttccgtcattgagacgttaattaatagcagctttcgggacagatgactgtggccatgtttcgtcacggccgcttcgtgccagctgggggtactatagtactgtgattttgttagtaaaaactttcattaggccaccattgacgaccgggccttcgcttttgctgcgctaattaaccatttcccggcgaccgaagggaacatgaacatgccccgacacatgagggcatgaggactagtgttctccctgtcgttcgttgacttgactagtgatagtttaaacgctcttcaactggaagagcggttactaccggttcactagctagctgctaatcgagctagttaccctatgaggtgacatgaagcgctcacggttactatgacggttagcttcacgactgttggtggcagtagcgtacgacttagctatagttccggacttacccttaagataacttcgtatagcatacattatacgaagttatgggcccacgcgtgaagagcggttaccagagctggtcacctttgtccaccaagatggaactgtcttcggccagaatggccatctggattcagcaggcctagaaggccatttatcgctatcaactttgtatagaaaagttgggccgaattcgagctcggtacggccagaatggcccggaccgggttacccggaccgaagcttgcatgcctgcagtgcagcgtgacccggtcgtgcccctctctagagataatgagcattgcatgtctaagttataaaaaattaccacatattttttttgtcacacttgtttgaagtgcagtttatctatctttatacatatatttaaactttactctacgaataatataatctatagtactacaataatatcagtgttttagagaatcatataaatgaacagttagacatggtctaaaggacaattgagtattttgacaacaggactctacagttttatctttttagtgtgcatgtgttctcctttttttttgcaaatagcttcacctatataatacttcatccattttattagtacatccatttagggtttagggttaatggtttttatagactaatttttttagtacatctattttattctattttagcctctaaattaagaaaactaaaactctattttagtttttttatttaataatttagatataaaatagaataaaataaagtgactaaaaattaaacaaataccctttaagaaattaaaaaaactaaggaaacatttttcttgtttcgagtagataatgccagcctgttaaacgccgtcgacgagtctaacggacaccaaccagcgaaccagcagcgtcgcgtcgggccaagcgaagcagacggcacggcatctctgtcgctgcctctggacccctctcgagagttccgctccaccgttggacttgctccgctgtcggcatccagaaattgcgtggcggagcggcagacgtgagccggcacggcaggcggcctcctcctcctctcacggcaccggcagctacgggggattcctttcccaccgctccttcgctttcccttcctcgcccgccgtaataaatagacaccccctccacaccctctttccccaacctcgtgttgttcggagcgcacacacacacaaccagatctcccccaaatccacccgtcggcacctccgcttcaaggtacgccgctcgtcctcccccccccccctctctaccttctctagatcggcgttccggtccatgcatggttagggcccggtagttctacttctgttcatgtttgtgttagatccgtgtttgtgttagatccgtgctgctagcgttcgtacacggatgcgacctgtacgtcagacacgttctgattgctaacttgccagtgtttctctttggggaatcctgggatggctctagccgttccgcagacgggatcgatttcatgattttttttgtttcgttgcatagggtttggtttgcccttttcctttatttcaatatatgccgtgcacttgtttgtcgggtcatcttttcatgcttttttttgtcttggttgtgatgatgtggtctggttgggcggtcgttctagatcggagtagaattctgtttcaaactacctggtggatttattaattttggatctgtatgtgtgtgccatacatattcatagttacgaattgaagatgatggatggaaatatcgatctaggataggtatacatgttgatgcgggttttactgatgcatatacagagatgctttttgttcgcttggttgtgatgatgtggtgtggttgggcggtcgttcattcgttctagatcggagtagaatactgtttcaaactacctggtgtatttattaattttggaactgtatgtgtgtgtcatacatcttcatagttacgagtttaagatggatggaaatatcgatctaggataggtatacatgttgatgtgggttttactgatgcatatacatgatggcatatgcagcatctattcatatgctctaaccttgagtacctatctattataataaacaagtatgttttataattattttgatcttgatatacttggatgatggcatatgcagcagctatatgtggatttttttagccctgccttcatacgctatttatttgcttggtactgtttcttttgtcgatgctcaccctgttgtttggtgttacttctgcaggtcgactttaacttagcctaggatccatggcggccaatgcgggcggcggtggagcgggaggaggcagcggcagcggcagcgtggctgcgccggcggtgtgccgccccagcggctcgcggtggacgccgacgccggagcagatcaggatgctgaaggagctctactacggctgcggcatccggtcgcccagctcggagcagatccagcgcatcaccgccatgctgcggcagcacggcaagatcgagggcaagaacgtcttctactggttccagaaccacaaggcccgcgagcgccagaagcgccgcctcaccagcctcgacgtcaacgtgcccgccgccggcgcggccgacgccaccaccagccaactcggcgtcctctcgctgtcgtcgccgccgccttcaggcgcggcgcctccctcgcccaccctcggcttctacgccgccggcaatggcggcggatcggctgtgctgctggacacgagttccgactggggcagcagcggcgctgctatggccaccgagacatgcttcctgcaggactacatgggcgtgacggacacgggcagctcgtcgcagtggccacgcttctcgtcgtcggacacgataatggcggcggccgcggcgcgggcggcgacgacgcgggcgcccgagacgctccctctcttcccgacctgcggcgacgacggcggcagcggtagcagcagctacttgccgttctggggtgccgcgtccacaactgccggcgccacttcttccgttgcgatccaacagcaacaccagctgcaggagcagtacagcttttacagcaacagcaacagcacccagctggccggcaccggcaaccaagacgtatcggcaacagcagcagcagccgccgccctggagctgagcctcagctcatggtgctccccttaccctgctgcagggagtatgtgagagcaacgcgagctgccactgctcttcactgatgtctctggaatggaaggaggaggaagtgagaacagatcattcgacaaagcagcattagtccgttgatcggtggaagaccactcgtcagtgttgagttgaatgtttgatcaataaaatacggcaatgctgtaagggttgttttttatgccattgataatacactgtactgttcagttgttgaactctatttcttagccatgccaagtgcttttcttattttgaataacattacagcaaaaagttgaaagacaaaaaaaaaaacccccgaacagagtgctttgggtcccaagcttctttagactgtgttcggcgttccccctaaatttctccccctatatctcactcacttgtcacatcagcgttctctttccccctatatctccacgctctacagcagttccacctatatcaaacctctataccccaccacaacaatattatatactttcatcttcaactaactcatgtaccttccaatttttttctactaataattatttacgtgcacagaaacttagcaaggagagagagagcgggaatttaaatgctcggcgttaggcttttagtccgctaggtggctagaccgaggttaggacgctagttcactaggggcctagtggtgttttaagggttaccatcgagcagctggcttgtggggaccagacaaaaaaggaatggtgcagaattgttaggcgcacctaccaaaagcatctttgcctttattgcaaagataaagcagattcctctagtacaagtggggaacaaaataacgtggaaaagagctgtcctgacagcccactcactaatgcgtatgacgaacgcagtgacgaccacaaaactcgagcaacgagatcatgagccaatcaaagaggagtgatgtagacctaaagcaataatggagccatgacgtaagggcttacgcccatacgaaataattaaaggctgatgtgacctgtcggtctctcagaacctttactttttatgtttggcgtgtatttttaaatttccacggcaatgacgatgtgaccgtcgacccactaaaacattgctttgtcaaaagctaaaaaagatgatgcccgacagccacttgtgtgaagcatgagaagccggtccctccactaagaaaattagtgaagcatcttccagtggtccctccactcacagctcaatcagtgagcaacaggacgaaggaaatgacgtaagccatgacgtctaatcccagcggccgctgcgtctggacgcacaagtcatagcattatcggctaaaatttcttaatttctaaattagtcatatcggctaagaaagtggggagcactatcatttcgtagaacaagaacaaggtatcatatatatatatatatataatatttaaactttgttaagtggaatcaaagtgctagtattaatggagtttcatgtgcattaaattttatgtcacatcagcaattttgttgacttggcaaggtcatttagggtgtgtttggaagacaggggctattaggagtattaaacatagtctaattacaaaactaattgcacaaccgctaagctgaatcgcgagatggatctattaagcttaattagtccatgatttgacaatgtggtgctacaataaccatttgctaatgatggattacttaggtttaatagattcgtctcgtgatttagcctatgggttctgctattaattttgtaattagctcatatttagttcttataattagtatccgaacatccaatgtgacatgctaaagtttaaccctggtatccaaatgaagtcttatgagagtttcatcactccggtggtatatgtacttaggctccgttttcttccaccgacttatttttagcacccgtcacattgaatgtttagatactaattagaagtattaaacgtagactatttacaaaatccattacataagacgaatctaaacggcgagacgaatctattaaacctaattagtccatgatttgacaatgtgttgctacagtaaacatttgctaatgatggattaattaggcttaatagattcgtctcgccgtttagcctccacttatgtaatgggttttctaaacaatctacgtttaatactcctaattagtatctaaatattcaatgtgacacgtgctaaaaataagtcagtggaaggaagagaacgtccccttagttttccatcttattaattgtacgatgaaactgtgcagccagatgattgacaatcgcaatacttcaactagtgggccatgcacatcagcgacgtgtaacgtcgtgagttgctgttcccgtagagaaatatcaactggtgggccacgcacatcagcgtcgtgtaacgtggacggaggagccccgtgacggcgtcgacatcgaacggccaccaaccacggaaccacccgtccccacctctcggaagctccgctccacggcgtcgacatctaacggctaccagcaggcgtacgggttggagtggactccttgcctctttgcgctggcggcttccggaaattgcgtggcggagacgaggcgggctcgtctcacacggcacggaagacgtcacgggttccttccccacctctcctcttccccaccgccataaatagccgaccccctcgcctttctccccaatctcatctcgtctcgtgttgttcggagcacaccacccgccccaaatcgttcttcccgcaagcctcggcgatccttcacccgcttcaaggtacggcgatcgtcttcctcctctagatcggcgtgatctgcaagtagttgatttggtagatggttaggatctgtgcactgaagaaatcatgttagatccgcgatgtttctgttcgtagatggctgggaggtggaatttttgtgtagatctgatatgttctcctgtttatcttgtcacgctcctgcgatttgtggggattttaggtcgttgatctgggaatcgtggggttgcttctaggctgttcgtagatgaggtcgttctcacggtttactggatcattgcctagtagatcagctcgggctttcgtctttgtatatggtgcccatacttgcatctatgatctggttccgtggtgttacctaggtttctgcgcctgattcgtccgatcgattttgttagcatgtggtaaacgtttggtcatggtctgatttagattagagtcgaataggatgatctcgatctagctcttgggattaatatgcatgtgtcaccaatctgttccgtggttaagatgatgaatctatgtttagttaatgggtgtagatatatatgctgctgttcctcaatgatgccgtagcttttacctgagcagcatggttcctcctgttacttaggtagatgcacatgcttatagatcaagatatgtactgctactgttggaattgtttagtatacctgatgatcatccatgctcttgttacttgttttggtatacttggatgatggcatgctgctgctttttgttgatttgagcccatccatatctgcatatgtcacatgattaagatgattacgctgtttctgtatgatgccatagcttttatgtgagcaacatgcatcctcctggttatatgcattaatagatggaagatatctattgctacaatttgatgattattttgtacatacgatgatcaagcatgctcttcatactttgttgatatacttggataatgaaatgctgctgcacgttcattctatagcactaatgatgtgatgaacacgcacgacctgtttgtggcatctgtttgaatgtgttgttgctgttcactagagactgttttattaacctactgctagatacttacccttctgtctgtttattcttttgcagggatccatggccactgtgaacaactggctcgctttctccctctccccgcaggagctgccgccctcccagacgacggactccacactcatctcggccgccaccgccgaccatgtctccggcgatgtctgcttcaacatcccccaagattggagcatgaggggatcagagctttcggcgctcgtcgcggagccgaagctggaggacttcctcggcggcatctccttctccgagcagcatcacaaggccaactgcaacatgatacccagcactagcagcacagtttgctacgcgagctcaggtgctagcaccggctaccatcaccagctgtaccaccagcccaccagctcagcgctccacttcgcggactccgtaatggtggcttcctcggccggtgtccacgacggcggtgccatgctcagcgcggccgccgctaacggtgtcgctggcgctgccagtgccaacggcggcggcatcgggctgtccatgattaagaactggctgcggagccaaccggcgcccatgcagccgagggtggcggcggctgagggcgcgcaggggctctctttgtccatgaacatggcggggacgacccaaggcgctgctggcatgccacttctcgctggagagcgcgcacgggcgcccgagagtgtatcgacgtcagcacagggtggagccgtcgtcgtcacggcgccgaaggaggatagcggtggcagcggtgttgccggcgctctagtagccgtgagcacggacacgggtggcagcggcggcgcgtcggctgacaacacggcaaggaagacggtggacacgttcgggcagcgcacgtcgatttaccgtggcgtgacaaggcatagatggactgggagatatgaggcacatctttgggataacagttgcagaagggaagggcaaactcgtaagggtcgtcaagtctatttaggtggctatgataaagaggagaaagctgctagggcttatgatcttgctgctctgaagtactggggtgccacaacaacaacaaattttccagtgagtaactacgaaaaggagctcgaggacatgaagcacatgacaaggcaggagtttgtagcgtctctgagaaggaagagcagtggtttctccagaggtgcatccatttacaggggagtgactaggcatcaccaacatggaagatggcaagcacggattggacgagttgcagggaacaaggatctttacttgggcaccttcagcacccaggaggaggcagcggaggcgtacgacatcgcggcgatcaagttccgcggcctcaacgccgtcaccaacttcgacatgagccgctacgacgtgaagagcatcctggacagcagcgccctccccatcggcagcgccgccaagcgcctcaaggaggccgaggccgcagcgtccgcgcagcaccaccacgccggcgtggtgagctacgacgtcggccgcatcgcctcgcagctcggcgacggcggagccctggcggcggcgtacggcgcgcactaccacggcgccgcctggccgaccatcgcgttccagccgggcgccgccagcacaggcctgtaccacccgtacgcgcagcagccaatgcgcggcggcgggtggtgcaagcaggagcaggaccacgcggtgatcgcggccgcgcacagcctgcaggacctccaccacctgaacctgggcgcggccggcgcgcacgactttttctcggcagggcagcaggccgccgccgctgcgatgcacggcctgggtagcatcgacagtgcgtcgctcgagcacagcaccggctccaactccgtcgtctacaacggcggggtcggcgacagcaacggcgccagcgccgtcggcggcagtggcggtggctacatgatgccgatgagcgctgccggagcaaccactacatcggcaatggtgagccacgagcaggtgcatgcacgggcctacgacgaagccaagcaggctgctcagatggggtacgagagctacctggtgaacgcggagaacaatggtggcggaaggatgtctgcatgggggactgtcgtgtctgcagccgcggcggcagcagcaagcagcaacgacaacatggccgccgacgtcgggcatggcggcgcgcagctcttcagtgtctggaacgacacttaatattggtaccgtcatgggtcgtttaagctgccgatgtgcctgcgtcgtctggtgccctctctccatatggaggttgtcaaagtatctgctgttcgtgtcatgagtcgtgtcagtgttggtttaataatggaccggttgtgttgtgtgtgcgtactacccagaactatgacaaatcatgaataagtttgatgtttgaaattaaagcctgtgctcattatgttctgtctttcagttgtctcctaatatttgcctgcaggtactggctatctaccgtttcttacttaggaggtgtttgaatgcactaaaactaatagttagtggctaaaattagttaaaacatccaaacaccatagctaatagttgaactattagctatttttggaaaattagttaatagtgaggtagttatttgttagctagctaattcaactaacaatttttagccaactaacaattagtttcagtgcattcaaacacccccttaatgttaaggtggttctatctaccgtctcctaatatatggttgattgttcggtttgttgctatgctattgggttctgattgctgctagttcttgctgaatccagaagttctcgtagtatagctcagattcatattatttatttgagtgataagtgatccaggttattactatgttagctaggttttttttacaaggataaattatctgtgatcataattcttatgaaagctttatgtttcctggaggcagtggcatgcaatgcatgacagcaacttgatcacaccagctgaggtagatacggtaacaaggttcttaaatctgttcaccaaatcattggagaacacacatacacattcttgccagtcttggttagagaaatttcatgacaaaatgccaaagctgtcttgactcttcacttttggccatgagtcgtgacgcgacttattgaactagtctagggcgcggctaacaacctagcttagattgccttgtctaaacccttaggctaacgcgccactctagaaggccgatctcccgggataacttcgtatagcatacattatacgaagttatgaattccggaccggcctagaaggccccagagctggtcaccccatacgattggaagcttcaagtttgtacaaaaaagcaggctccggccagaatggcccggaccgaagccgaggccggccacactgatagtttaaactgaaggcgggaaacgacaatctgatcatgagcggagaattaagggagtcacgttatgacccccgccgatgacgcgggacaagccgttttacgtttggaactgacagaaccgcaacgattgaaggagccactcagccgcgggtttctggagtttaatgagctaagcacatacgtcagaaaccattattgcgcgttcaaaagtcgcctaaggtcactatcagctagcaaatatttcttgtcaaaaatgctccactgacgttccataaattcccctcggtatccaattagagtctcatattcactctcccggcggatctcgactctagaggatcgctcaggaaggccgctgagatagagccatggggaggagggcgtgttgcgcgaaggaaggcgttaagagaggggcgtggacgagcaaggaggacgatgccttggccgcctacgtcaaggcccacggcgaaggcaaatggagggaagtgccccagaaagccggtttgcgtcggtgcggcaagagctgccggctgcggtggctgaactacctccggcccaacatcaggcgcggcaacatctcctacgacgaggaggatctcatcatccgcctccacaggctcctcggcaacaggtggtcgctgattgcaggcaggctgcctggccgaacagacaatgaaatcaagaactactggaacagcacgctgggccggagggcaggcgccggcgccggcgccggcggcagatccacgatggcgctttcagcttcccgagttcagcaggcggaagaactgctgcaacgacctgctgagaggcagctgatgaggagccagcttgctgcagccgccaggagcatcaactggagctacgccctcttctggtccatttcagacactcaaccaggggtgctgacgtggacggacgggttctacaacggcgaggtgaagacgcggaagatttccaactccgtggagctgacatccgaccagctcgtcatgcagaggagcgaccagctccgggagctctacgaggccctcctgtcgggcgagggcgaccgccgcgctgcgcctgcgcggccggccggctctctgtcgccggaggacctcggcgacaccgagtggtactacgtggtgtccatgacctacgccttccggccaggccaagggttgcccggcaggagtttcgcgagcgacgagcatgtctggctgtgcaacgcgcacctcgccggcagcaaagccttcccccgcgcgctcctcgccaagagcgcgtccattcagtcaatcctctgcatcccggttatgggcggcgtgcttgagcttggtacaactgacacggtgccggaggccccggacttggtcagccgagcaaccgcggctttctgggagccgcagtgcccgagctccagcccgtcaggacgagcaaacgagacgggcgaggccgcagcagacgacggcacgtttgcgttcgaggaactcgaccacaataatggcatggacgacatagaggcgatgaccgccgccgggggacacgggcaggaggaggagctaagactaagagaagccgaggccctgtcagacgacgcaagcctggagcacatcaccaaggagatcgaggagttctacagcctctgcgacgaaatggacctgcaggcgctaccactaccgctagaggacggctggaccgtggacgcgtccaatttcgaggtcccctgctcttccccgcagccagcgccgcctccggtggatagggctaccgctaacgtcgccgccgacgcctcaagggcacccgtctacggctctcgcgcgacgagtttcatggcttggacgaggtcctcgcagcagtcgtcgtgctccgacgacgcggcgcccgcagcagtagtgccggccatcgaggagccgcagagattgctgaagaaagtggtggccggcggcggtgcttgggagagctgtggcggcgcgacgggagcagcacaggaaatgagtggcactggcaccaagaaccacgtcatgtcggagcgaaagcgacgagagaagctcaacgagatgttcctcgtcctcaagtcactgcttccgtccattcacagggtgaacaaagcgtcgatcctcgccgaaacgatagcctacctcaaggagcttcagagaagggtgcaagagctggagtccagtagggaacctgcgtcgcgcccatccgaaacgacgacaaggctaataacaaggccctcccgtggcaataatgagagtgtgaggaaggaggtctgcgcgggctccaagaggaagagcccagagctcggcagagacgacgtggagcgccccccggtcctcacgatggacgccggcaccagcaacgtcaccgtcaccgtctcggacaaggatgtgctcctggaggtgcagtgccggtgggaggagctcctgatgacgcgagtgttcgacgccatcaagagcctccatttggacgtcctctcggttcaggcttcagcgccagatggcttcatggggcttaagatacgagctcagtttgctggctccggtgccgtcgtgccctggatgatcagcgaggctcttcgcaaagctatagggaacccctgggtcgtcgtcgcgccggacaccggctcgcacgccaccccggccgcgacgtcgggcgcctgcgagacgggccagaatagcgccgctcatcgcgcggaccccgactcagccgggacgacgacgacctcggcggcggcggtgtgggcgcccaaggccgtgcggtgcacgggcggactcttcttcttccaccgggacacgacgccggcgcacgcgggcgagacggcgacgccaatggccggtggaggtggaggaggaggaggagaagcagggtcgtcggacgactgcagctcggcggcgtcggtatcgcttcgcgtcggaagccacgacgagccgtgcttctccggcgacggtgacggcgactggatggacgacgtgagggccctggcgtcgtttctggagtccgacgaggactggctccgctgtcagacggccgggcagcttgcgtagtggccaggtaccactaactatctatactgtaataatgttgtatagccgccggatagctagctagtttagtcattcagcggcgatgggtaataataaagtgtcatccatccatcaccatgcgtggcaacgtgagcaatgacctgattgaacaaattgaaatgaaaagaagaaatatgttatatgtcaacgagatttcctcataatgccactgacgacgtgtgtccaagaaatgtatcagtgatacgtatattcacaatttttttatgacttatactcacaatttgtttttttactacttatactcacaatttgttgtgcgtaccataacaatttcgatcgaatatatatcagaaagttgacgaaagtaagctcactcaaaaagttaaatgggctgcggaagctgcgtcaggcccaagttttggctattctatccggtatccacgattttgatggctgagggacatatgttcgcttaagcttggcgcgccggtcacccggtccgggcctagaaggccagcttcggccgccccgggcaactttattatacaaagttgatagatgtacctgattccgatgacttcgtaggttcctagctcaagccgctcgtgtccaagcgtcacttacgattagctaatgattacggcatctaggaccgactagctaactaactagtacgtacgcgccgactagctagctaaggtaccgagctcgaattcattccgattaatcgtggcctcttgctcttcaggatgaagagctatgtttaaacgtgcaagcgctactagacaattcagtacattaaaaacgtccgcaatgtgttattaagttgtctaagcgtcaatttgtttacaccacaatatatcctgcca

SEQ ID NO: 343 - DNA, 19057 bp, synthetic construct
  misc_feature 1..19057: note = PHV00001
  source 1..19057: mol_type = other DNA
gtttacccgccaatatatcctgtcaaacactgcggccgcacttgaccgcggatggagccggagctgtggtgaggccatcgacgggaggtgggggagaacacagtctcagtgttctttgtgagtccgcaaggtttttagcttttctgtattaattaaggttgctgttggctgtagaatacggtcgtggaagagctgtatcggtagctactacgtaagctattatatactggaagtctggagctcgtcgatctccggtcgtcttcctccatttctcctcgtcttgctttgactgctgctaccatttgcttctgttttctgatgaagcatgccatgtcggccaccagtgtttgtgtggtttttgcagggaatggctttcaagtgctgtgattgaatggccctcgtcgtcctcggctgagctcacatggacgcgtcatgtgagtgagatatatgatcatatgatgagtggggttcgggtgagtgcgtacttgaagtaggatcccgctttcactcattcattcattggcctttaaaccgggaaattttcgcgaggagatggagggaagcaagcagggtgacgagtgcagagtgccgcgagcgctttgtcaaaaggcaccgccgtaggcaaaaaaatcaatggccctgactgactcgatggtagtactactgtagagactagagagggttgctccccatatcttcgtgtgacttttactccagcattgcatttccgtcattgagacgttaattaatagcagctttcgggacagatgactgtggccatgtttcgtcacggccgcttcgtgccagctgggggtactatagtactgtgattttgttagtaaaaactttcattaggccaccattgacgaccgggccttcgcttttgctgcgctaattaaccatttcccggcgaccgaagggaacatgaacatgccccgacacatgagggcatgaggactagtgttctccctgtcgttcgttgacttgactagtgatagtttaaacgctcttcaactggaagagcggttactaccggttcactagctagctgctaatcgagctagttaccctatgaggtgacatgaagcgctcacggttactatgacggttagcttcacgactgttggtggcagtagcgtacgacttagctatagttccggacttacctagctaataacttcgtatagcatacattatacgaagttatggttaccgagctgttaccaagcggccgcacgtcacggtcactacgaatcgaccgaagcttgcatgggccgcatcgagcagctggcttgtggggaccagacaaaaaaggaatggtgcagaattgttaggcgcacctaccaaaagcatctttgcctttattgcaaagataaagcagattcctctagtacaagtggggaacaaaataacgtggaaaagagctgtcctgacagcccactcactaatgcgtatgacgaacgcagtgacgaccacaaaactcgagcaacgagatcatgagccaatcaaagaggagtgatgtagacctaaagcaataatggagccatgacgtaagggcttacgcccatacgaaataattaaaggctgatgtgacctgtcggtctctcagaacctttactttttatgtttggcgtgtatttttaaatttccacggcaatgacgatgtgaccgtcgacccactaaaacattgctttgtcaaaagctaaaaaagatgatgcccgacagccacttgtgtgaagcatgagaagccggtccctccactaagaaaattagtgaagcatcttccagtggtccctccactcacagctcaatcagtgagcaacaggacgaaggaaatgacgtaagccatgacgtctaatcccagggccagcttgcatgcctgcagtgcagcgtgacccggtcgtgcccctctctagagataatgagcattgcatgtctaagttataaaaaattaccacatattttttttgtcacacttgtttgaagtgcagtttatctatctttatacatatatttaaactttactctacgaataatataatctatagtactacaataatatcagtgttttagagaatcatataaatgaacagttagacatggtctaaaggacaattgagtattttgacaacaggactctacagttttatctttttagtgtgcatgtgttctcctttttttttgcaaatagcttcacctatataatacttcatccattttattagtacatccatttagggtttagggttaatggtttttatagactaatttttttagtacatctattttattctattttagcctctaaattaagaaaactaaaactctattttagtttttttatttaataatttagatataaaatagaataaaataaagtgactaaaaattaaacaaataccctttaagaaattaaaaaaactaaggaaacatttttcttgtttcgagtagataatgccagcctgttaaacgccgtcgacgagtctaacggacaccaaccagcgaaccagcagcgtcgcgtcgggccaagcgaagcagacggcacggcatctctgtcgctgcctctggacccctctcgagagttccgctccaccgttggacttgctccgctgtcggcatccagaaattgcgtggcggagcggcagacgtgagccggcacggcaggcggcctcctcctcctctcacggcaccggcagctacgggggattcctttcccaccgctccttcgctttcccttcctcgcccgccgtaataaatagacaccccctccacaccctctttccccaacctcgtgttgttcggagcgcacacacacacaaccagatctcccccaaatccacccgtcggcacctccgcttcaaggtacgccgctcgtcctcccccccccccctctctaccttctctagatcggcgttccggtccatgcatggttagggcccggtagttctacttctgttcatgtttgtgttagatccgtgtttgtgttagatccgtgctgctagcgttcgtacacggatgcgacctgtacgtcagacacgttctgattgctaacttgccagtgtttctctttggggaatcctgggatggctctagccgttccgcagacgggatcgatttcatgattttttttgtttcgttgcatagggtttggtttgcccttttcctttatttcaatatatgccgtgcacttgtttgtcgggtcatcttttcatgcttttttttgtcttggttgtgatgatgtggtctggttgggcggtcgttctagatcggagtagaattctgtttcaaactacctggtggatttattaattttggatctgtatgtgtgtgccatacatattcatagttacgaattgaagatgatggatggaaatatcgatctaggataggtatacatgttgatgcgggttttactgatgcatatacagagatgctttttgttcgcttggttgtgatgatgtggtgtggttgggcggtcgttcattcgttctagatcggagtagaatactgtttcaaactacctggtgtatttattaattttggaactgtatgtgtgtgtcatacatcttcatagttacgagtttaagatggatggaaatatcgatctaggataggtatacatgttgatgtgggttttactgatgcatatacatgatggcatatgcagcatctattcatatgctctaaccttgagtacctatctattataataaacaagtatgttttataattattttgatcttgatatacttggatgatggcatatgcagcagctatatgtggatttttttagccctgccttcatacgctatttatttgcttggtactgtttcttttgtcgatgctcaccctgttgtttggtgttacttctgcaggtcgactttaacttagcctaggatccatggccactgtgaacaactggctcgctttctccctctccccgcaggagctgccgccctcccagacgacggactccacactcatctcggccgccaccgccgaccatgtctccggcgatgtctgcttcaacatcccccaagattggagcatgaggggatcagagctttcggcgctcgtcgcggagccgaagctggaggacttcctcggcggcatctccttctccgagcagcatcacaaggccaactgcaacatgatacccagcactagcagcacagtttgctacgcgagctcaggtgctagcaccggctaccatcaccagctgtaccaccagcccaccagctcagcgctccacttcgcggactccgtaatggtggcttcctcggccggtgtccacgacggcggtgccatgctcagcgcggccgccgctaacggtgtcgctggcgctgccagtgccaacggcggcggcatcgggctgtccatgattaagaactggctgcggagccaaccggcgcccatgcagccgagggtggcggcggctgagggcgcgcaggggctctctttgtccatgaacatggcggggacgacccaaggcgctgctggcatgccacttctcgctggagagcgcgcacgggcgcccgagagtgtatcgacgtcagcacagggtggagccgtcgtcgtcacggcgccgaaggaggatagcggtggcagcggtgttgccggcgctctagtagccgtgagcacggacacgggtggcagcggcggcgcgtcggctgacaacacggcaaggaagacggtggacacgttcgggcagcgcacgtcgatttaccgtggcgtgacaaggcatagatggactgggagatatgaggcacatctttgggataacagttgcagaagggaagggcaaactcgtaagggtcgtcaagtctatttaggtggctatgataaagaggagaaagctgctagggcttatgatcttgctgctctgaagtactggggtgccacaacaacaacaaattttccagtgagtaactacgaaaaggagctcgaggacatgaagcacatgacaaggcaggagtttgtagcgtctctgagaaggaagagcagtggtttctccagaggtgcatccatttacaggggagtgactaggcatcaccaacatggaagatggcaagcacggattggacgagttgcagggaacaaggatctttacttgggcaccttcagcacccaggaggaggcagcggaggcgtacgacatcgcggcgatcaagttccgcggcctcaacgccgtcaccaacttcgacatgagccgctacgacgtgaagagcatcctggacagcagcgccctccccatcggcagcgccgccaagcgcctcaaggaggccgaggccgcagcgtccgcgcagcaccaccacgccggcgtggtgagctacgacgtcggccgcatcgcctcgcagctcggcgacggcggagccctggcggcggcgtacggcgcgcactaccacggcgccgcctggccgaccatcgcgttccagccgggcgccgccagcacaggcctgtaccacccgtacgcgcagcagccaatgcgcggcggcgggtggtgcaagcaggagcaggaccacgcggtgatcgcggccgcgcacagcctgcaggacctccaccacctgaacctgggcgcggccggcgcgcacgactttttctcggcagggcagcaggccgccgccgctgcgatgcacggcctgggtagcatcgacagtgcgtcgctcgagcacagcaccggctccaactccgtcgtctacaacggcggggtcggcgacagcaacggcgccagcgccgtcggcggcagtggcggtggctacatgatgccgatgagcgctgccggagcaaccactacatcggcaatggtgagccacgagcaggtgcatgcacgggcctacgacgaagccaagcaggctgctcagatggggtacgagagctacctggtgaacgcggagaacaatggtggcggaaggatgtctgcatgggggactgtcgtgtctgcagccgcggcggcagcagcaagcagcaacgacaacatggccgccgacgtcgggcatggcggcgcgcagctcttcagtgtctggaacgacacttaagcgtacctagtggtacctgacatcttatagtctgcaacctctcgtgtctgaattcctatctttatcaagtgttattgcttccacgactataggacagctttcgtcgaaagcttttgctcatgtgatctcgaaggattcatctagtctgatttttcgtgacttgtatcggttttattggattcatccaacatatatcaataaaaaatgagttgtgtttcctttcttcctagttcagttaaaattatttccctcctgcgcttgtgctgtaattgtctgtgtacctgttgtttgtgactgtgttagttcccttggatatgatttcgtatttgatatgtacatggagatagcttagcttcattattggagtatgaagttagtatgacatagtcactctcctggaaaattgacactgcaaaccatatttttattctgaaccacaaatcctagtcagtccgctggcatatgccgtccgtttgctgaatccagaacgtgggtttggagatgtacggctgagatgcctctatgcgaaggggatttcgtggtgaaacgagatgggagtagagcaacgcccgtggaagatgcttcaaacttccacacttttgagcaacgatcggcagtagtaaggtagacgatttcaagatcaaagcatatgaagataaacaacatcaacaacaaaatttgttggggttctatagagagaaacagagctacatacatacactgttttgtatctaccatctgagatgatgaaaagatgaaaaactaaagaatgccccggcgccaacgccaggacacgccgcgcgcgcgtcacccgagccatctcttgacccagccggcgctgtatatttacacacgttgcagcatcgatcaccacctgttcgatcgcgtcgccgtcaccggcgcgccgcgacttattgaactagtctagggcgcggctaacaacctagcttagattgccttgtctaaacccttaggctaacgcgccactctagaaggccgatctcccccgaacgcgccagatccgatatcgatgggccctggccgaagcttggtcacccgcaccttgctagttggatattacctcttctcttcaaagtatccttgaacgctcaccggttatcaaatctctacactatagctctgtagtcttgctagatagttagttctttagctctctctagaggttcacaaactcaatacaacacacagtggagtagggtattacgctccggcggcccgaaccactctaaatccttgtgtcctcgtgtgctcttccaccattaatgactgtaattgcagggacacgaagagttgtagcgcttttgccaacaagatccgctatatgctagtagagtggaacctgcacagcaacaagcatccaataatctgagaataagaattatgtgtggtgatggttctcatctctgcaactcgccattttcgcgagagaaccaaatccaagttggtgaagatcatgatttgggctcatgggctggcatagtagctattacctttgcaattgtggttcgaatctatccgatattctccttttcagggagagctaatgcttatgcttattgggtattttggtttgacactgcttcacgcccaaaaaaaggcaactatgtctgagttggatatggcccaaaaaaaggcagctatgtctgagttggatatggaagtcttctttcgtttagggtgaagtaagaccaagctcatgagcttattatcttaggtcggaacaaattagttgataggcatggcacatttatcaaattataatgattttaacagaaaagcaacacctctttttcagcagcaccagctttgcaagctgcaattgacactccaagcatagtatttgctccaaactcagcctgcatttcgcacaatatcatatctatttccatttggataaaatatattttccagaaatatgggaacagaatcaagatacagaaaaaagttgtggtagtagtggtaagtggaaacacaagtacagtgaaaagatagcattatttctgaacagtcaaattaaccgaaataagtagtatcacatactgcccctaaattgactacacccaatgtaaagaattgcttgagcatattgagccatcagttgtttgtttgtgtaacggatttgacaatgcagagttcaggagcaaaaaaccgcaaaggagagaaagagggaaaggatctcctagtatcccaccttgtggcgcgccctgtcaagtgcatgatggcctggtcgatctgcgtctgctgctgcggttccatcccaacgagtgcctccgacaccttgtcgttgatcacccgcaccgcgtaggcgacccccctggcgaggaacttccgcctctcggaggccccggccgcgtcggcggcggcgccctcgagcgcgcccacgctagccgtagatgctcggtgcacggccttgttggtgtgcaactcgacctcaacggccggtgcgctacgcccgtcaaggatctggcgcgcccgcaccctcgtgatcacggtgggcgcctcccgcctcatgtggccgacgatgaaaagcgccgggttaggggccttggcgcgcaccgccgtattcagggcctcctcgctcttgcgcgagagcaggtgcttccccaggtactcctgcactgacaaggctgccacagcggtggaatttgtcctcacgacttcgccacgtcgtcctcacctccctggcttcccacgactccgccgtatcgaggtgctcggtgggtcgtcttaatccgaagtccgaactaggaagacgagacagagaggtctgaggaatgggcctcgtttgatgttgagctgaattatttttccagcataagcccaggtcttggtccatgaacaaaattactagaaacccagcccagtactacgatctaaaagagggactgccactggatagctctctctagcattctccacgctccaatacagcggcgtcgtgtctatccgggtctatccgcgaacacgtgagaactctccagaaactgctttctcctccacttcatctctctcgctttccctctataaaaagaccccttctaggaattgagggagacagcaagcaccaagcagcgatccgaagctcaatcaattcactcaaacctcttccccaaatcttcgattagatcttcgttgacaagaagactagaaccgaacctgacatgtccaacctgctcacggttcaccagaaccttccggctcttccagtggacgcgacgtccgatgaagtcaggaagaacctcatggacatgttccgcgacaggcaagcgttcagcgagcacacctggaagatgctgctctccgtctgccgctcctgggctgcatggtgcaagctgaacaacaggaagtggttccccgctgagcccgaggacgtgagggattaccttctgtacctgcaagcgcgaggtttgtttctgcttctacctttgatatatatataataattatcattaattagtagtaatataatatttcaaatatttttttcaaaataaaagaatgtagtatatagcaattgcttttctgtagtttataagtgtgtatattttaatttataacttttctaatatatgaccaaaacatggtgatgcctaggtctggcagtgaagaccatccagcaacaccttggacaactgaacatgcttcacaggcgctccggcctcccgcgccccagcgactcgaacgccgtgagcctcgtcatgcgccgcatcaggaaggaaaacgtcgatgccggcgaaagggcaaagcaggccctcgcgttcgagaggaccgatttcgaccaggtccgcagcctgatggagaacagcgacaggtgccaggacattaggaacctggcgttcctcggaattgcatacaacacgctcctcaggatcgcggaaattgcccgcattcgcgtgaaggacattagccgcaccgacggcggcaggatgcttatccacattggcaggaccaagacgctcgtttccaccgcaggcgtcgaaaaggccctcagcctcggagtgaccaagctcgtcgaacgctggatctccgtgtccggcgtcgcggacgacccaaacaactacctcttctgccgcgtccgcaagaacggggtggctgcccctagcgccaccagccaactcagcacgagggccttggaaggtattttcgaggccacccaccgcctgatctacggcgcgaaggatgacagcggtcaacgctacctcgcatggtccgggcactccgcccgcgttggagctgctagggacatggcccgcgccggtgtttccatccccgaaatcatgcaggcgggtggatggacgaacgtgaacattgtcatgaactacattcgcaaccttgacagcgagacgggcgcaatggttcgcctcctggaagatggtgactgaggtacccaacctagacttgtccatcttctggattggccaacttaattaatgtatgaaataaaaggatgcacacatagtgacatgctaatcactataatgtgggcatcaaagttgtgtgttatgtgtaattactagttatctgaataaaagagaaagagatcatccatatttcttatcctaaatgaatgtcacgtgtctttataattctttgatgaaccagatgcatttcattaaccaaatccatatacatataaatattaatcatatataattaatatcaattgggttagcaaaacaaatctagtctaggtgtgttttgcgatccgatatcgacgtctaaaaacggcccctaactaacgcttagttgcccgctagattagtcccccgttagtgcctagttagacacacgacgaactaggggctagtgccaccttgctagttggatattacctcttctcttcaaagtatccttgaacgctcaccggttatcaaatctctacactatagctctgtagtcttgctagatagttagttctttagctctcgcacgataacttcgtatagcatacattatacgaagttataacagcggaccgggttaccgaattcctgcccttaaggccaattgttcaagattcattcaacaattgaaacatctcccatgattaaatcagtataaggttgctatggtcttgcttgacaaagtttttttttgagggaatttcaactaaatttttgagtgaaactatcaaatactgattttaaaaaatttttataaaaggaagcgcagagataaaaggccatctatgctacaaaagtacccaaaaatgtaatcctaaagtatgaattgcattttttttttgtttggacgaaaggaaaggagtattaccacaagaatgatatcatcttcatatttagatcttttttgggtaaagcttgagattctctaaatatagagaaatcagaagaaaaaaaaaccgtgttttggtggttttgatttctagcctccacaataactttgacggcgtcgacaagtctaacggacaccaagcagcgaaccaccagcgccgagccaagcgaagcagacggccgagacgttgacaccttcggcgcggcatctctcgagagttccgctccggcgctccacctccaccgctggcggtttcttattccgttccgttccgcctcctgctctgctcctctccacaccacacggcacgaaaccgttacggcaccggcagcacccagcacgggagaggggattcctttcccaccgttccttccctttccgccccgccgctataaatagccagccccatccccagcttttttccccaatctcatctcctctctcctgttgttcggagcacacgcacaatccgatcgatccccaaatccccttcgtctctcctcgcgagcctcgtggatcccagcttcaaggtacggcgatcgatcatcccccctccttctctctaccttcttttctctagactacatcggatggcgatccatggttagggcctgctagtttcccttcctgttttgtcgatggctgcgaggcacaatagatctgatggcgttatgacggctaacttgtcatgttgttgcgatttatagtccctttaggagatcagtttaatttctcggatggttcgagatcggtggtccatggttagtaccctaagatccgcgctgttagggttcgtagatggaggcgacctgttctgattgttaacttgtcagtacctgggaaatcctgggatggttctagctcgtccgcagatgagatcgatttcatgatcctctgtatcttgtttcgttgcctaggttccgtctaatctatccgtggtatgatgtagatgttttgatcgtgctaactacgtcttgtaaagttaattgtcaggtcataatttttagcatgcctttttttttgtttggttttgtctaattgggctgtcgttctagatcagagtagaagactgttccaaactacctgctggatttattgaacttggatctgtatgtgtgtcacatatcttcataaattcatgattaagatggattgaaatatcttttatctttttggtatggatagttctatatgttggtgtggctttgttagatgtatacatgcttagatacatgaagcaacgtgctgctactgtttagtaattgctgttcatttgtctaataaacagataaggatatgtatttatgttgctgttggttttgctggtactttgttggatacaaatgcttcaatacagaaaacagcatgctgctacgatttaccatttatctaatcttatcatatgtctaatctaataaacaaacatgcttttaaattatcttcatatgcttggatgatggcatacacagcggctatgtgtggttttttaaatacccagcatcatgggcatgcatgacactgctttaatatgctttttatttgcttgagactgtttcttttgtttatactgaccctttagttcggtgactcttctgcaggtcgactttaacttagcctaggatccatggcccagtccaagcacggcctgaccaaggagatgaccatgaagtaccgcatggagggctgcgtggacggccacaagttcgtgatcaccggcgagggcatcggctaccccttcaagggcaagcaggccatcaacctgtgcgtggtggagggcggccccttgcccttcgccgaggacatcttgtccgccgccttcatgtacggcaaccgcgtgttcaccgagtacccccaggacatcgtcgactacttcaagaactcctgccccgccggctacacctgggaccgctccttcctgttcgaggacggcgccgtgtgcatctgcaacgccgacatcaccgtgagcgtggaggagaactgcatgtaccacgagtccaagttctacggcgtgaacttccccgccgacggccccgtgatgaagaagatgaccgacaactgggagccctcctgcgagaagatcatccccgtgcccaagcagggcatcttgaagggcgacgtgagcatgtacctgctgctgaaggacggtggccgcttgcgctgccagttcgacaccgtgtacaaggccaagtccgtgccccgcaagatgcccgactggcacttcatccagcacaagctgacccgcgaggaccgcagcgacgccaagaaccagaagtggcacctgaccgagcacgccatcgcctccggctccgccttgccctccggactcagatctcgatagggtaccaatggccagttaacagatccagctgctgctgttctagggttcacaagtctgcctatttgtcttccccaatggagctatggttgtctggtctggtccttggtcgtgtcccgtttcattgtgtactatttacctgtaatgtgtatccttaagtctggtttgatggtgtctgaaacgttttgctgtggtagagcagcatggaagaactataatgaataagtgatccctaatcattgtgtccaaattttgcttctgctatacccttttgtgctgtttcttatgttttgcttaaaaatttgatctgacaaacaaatttgtctaaattatgctcttgttctgactgtgtactgtacacatttgtattgctaccggtttggcacatagttttctctttgattgcagatcaaacccttctgattgcagattgcttggctatggctgatgtgctcactgttcttctttagcttgtatattgctgatggtggcttggctacggctgaaaaagttgctgctgcgccgacttggcaactgttgctccagtaatgctttgtcctctcttcctagccgccgacttggcacttggcagctgttgctcctgtaatgcgttgttatctcttatctcttgagatgtactatgattttgaggctgtttgacttgtgccagattgccagtgctgatgctatattatctcaggtttttatgctagtatatgttttactgtgtgctgcctgtgtcgagttacgtaatctattgaaccgctatgcgtgttgatgccctgttgttgcttgccagattgatgcccctgttgcttgcagcttgcaagctgtagtgaaatcctaaaattcgaaaccaaatctattctgaacttttgaagatctgtgatgtccggaagaaaagattcaaacagataaacgggactctccagaatctataaaataaatgatcgacaaacgctttgctttggtaggcttcctagttagttagcggaccgaagcttcggtccgggcctgcggccgcagatatcagaacctgcgtctggacgcacaagtcatagcattatcggctaaaatttcttaatttctaaattagtcatatcggctaagaaagtggggagcactatcatttcgtagaacaagaacaaggtatcatatatatatatatatataatatttaaactttgttaagtggaatcaaagtgctagtattaatggagtttcatgtgcattaaattttatgtcacatcagcaattttgttgacttggcaaggtcatttagggtgtgtttggaagacaggggctattaggagtattaaacatagtctaattacaaaactaattgcacaaccgctaagctgaatcgcgagatggatctattaagcttaattagtccatgatttgacaatgtggtgctacaataaccatttgctaatgatggattacttaggtttaatagattcgtctcgtgatttagcctatgggttctgctattaattttgtaattagctcatatttagttcttataattagtatccgaacatccaatgtgacatgctaaagtttaaccctggtatccaaatgaagtcttatgagagtttcatcactccggtggtatatgtacttaggctccgttttcttccaccgacttatttttagcacccgtcacattgaatgtttagatactaattagaagtattaaacgtagactatttacaaaatccattacataagacgaatctaaacggcgagacgaatctattaaacctaattagtccatgatttgacaatgtgttgctacagtaaacatttgctaatgatggattaattaggcttaatagattcgtctcgccgtttagcctccacttatgtaatgggttttctaaacaatctacgtttaatactcctaattagtatctaaatattcaatgtgacacgtgctaaaaataagtcagtggaaggaagagaacgtccccttagttttccatcttattaattgtacgatgaaactgtgcagccagatgattgacaatcgcaatacttcaactagtgggccatgcacatcagcgacgtgtaacgtcgtgagttgctgttcccgtagagaaatatcaactggtgggccacgcacatcagcgtcgtgtaacgtggacggaggagccccgtgacggcgtcgacatcgaacggccaccaaccacggaaccacccgtccccacctctcggaagctccgctccacggcgtcgacatctaacggctaccagcaggcgtacgggttggagtggactccttgcctctttgcgctggcggcttccggaaattgcgtggcggagacgaggcgggctcgtctcacacggcacggaagacgtcacgggttccttccccacctctcctcttccccaccgccataaatagccgaccccctcgcctttctccccaatctcatctcgtctcgtgttgttcggagcacaccacccgccccaaatcgttcttcccgcaagcctcggcgatccttcacccgcttcaaggtacggcgatcgtcttcctcctctagatcggcgtgatctgcaagtagttgatttggtagatggttaggatctgtgcactgaagaaatcatgttagatccgcgatgtttctgttcgtagatggctgggaggtggaatttttgtgtagatctgatatgttctcctgtttatcttgtcacgctcctgcgatttgtggggattttaggtcgttgatctgggaatcgtggggttgcttctaggctgttcgtagatgaggtcgttctcacggtttactggatcattgcctagtagatcagctcgggctttcgtctttgtatatggtgcccatacttgcatctatgatctggttccgtggtgttacctaggtttctgcgcctgattcgtccgatcgattttgttagcatgtggtaaacgtttggtcatggtctgatttagattagagtcgaataggatgatctcgatctagctcttgggattaatatgcatgtgtcaccaatctgttccgtggttaagatgatgaatctatgcttagttaatgggtgtagatatatatgctgctgttcctcaatgatgccgtagcttttacctgagcagcatggatcgtcctgttacttaggtagatgcacatgcttatagatcaagatatgtactgctactgttggaattctttagtatacctgatgatcatccatgctcttgttacttgttttggtatacttggatgatggcatgctgctgctttttgttgatttgagcccatccatatctgcatatgtcacatgattaagatgattacgctgtttctgtatgatgccatagcttttatgtgagcaacatgcatcctcctggttatatgcattaatagatggaagatatctattgctacaatttgatgattattttgtacatacgatgatcaagcatgctcttcatactttgttgatatacttggataatgaaatgctgctgcacgttcattctatagcactaatgatgtgatgaacacgcacgacctgtttgtggcatctgtttgaatgtgttgttgctgttcactagagactgttttattaacctactgctagatacttacccttctgtctgtttattcttttgcagccagaatagcggatccgcccatggtcgaacaggacggcctgcatgcaggatcaccagcggcctgggtcgaaagactcttcggctacgactgggcacaacagaccatcgggtgtagcgacgcagctgttttcaggctgtccgcacagggcagacccgttttgttcgtcaaaacagacctgtctggcgcgctcaacgaactgcaagacgaggccgcaagactgagctggcttgctaccacaggcgttccttgtgctgcagtcctcgacgtcgttactgaggctggaagagactggctgctcctgggtgaagtcccaggacaggaccttttgtccagccatctggcacctgccgaaaaggtcagcatcatggcagacgccatgagaaggctgcacacactcgaccctgcaacatgccccttcgatcaccaggcaaaacacaggatcgagcgcgcaagaacgcgcatggaggctggtttggtcgaccaagatgacctcgacgaggaacaccaaggactggctcctgctgaactcttcgccagactcaaggcgagaatgccagacggtgacgacctggtcgtcacacacggcgacgcttgtctcccaaacataatggtcgagaacggacgcttcagcggtttcatcgactgcggtagactcggagtcgctgacagataccaggacatcgccctggcaacacgcgacatcgcagaggaactcggaggcgaatgggctgacaggtttctcgtgctctacggtatcgctgctccagacagccagaggatcgcattctacaggctcctcgacgagttcttttagttcgaacggtacccggggatcctctagtgccgtgggtcgtttaagctgccgctgtacctgtgtcgtctggtgccttctggtgtacctgggaggttgtcgtctatcaagtatctgtggttggtgtcatgagtcagtgagtcccaatactgttcgtgtcctgtgtgcattatacccaaaactgttatgggcaaatcatgaataagcttgatgttcgaacttaaaagtctctgctcaatatggtattatggttgtttttgttcgtctcctaatatttgcctgggatcaaattttattggctggtgttcatttgacctccatgttcttgctaggctccattttttactctacagccataatatgtttgattgtttggtttgttctttgttgtacacctggttctgtcgagcttagttttcgacactggcttacagcttaacatgttgctattttattgggttctgattgctattttattgggttctgattgctagtttttgctgaatccaaaaaccatgttatttatttaagcgatccaggttattattatgatggtggctaagtttttttttttccaagggtaaattttctggattctccagtgtttctgtggccgaattcaatcactagagtcgacctgcatgattccgatgacttcgtaggttcctagctcaagccgctcgtgtccaagcgtcacttacgattagctaatgattacggcatctaggaccgactagctagctagctaagagctcggtaccgagctcgaattcattccgattaatcgtggcctcttgctcttcaggatgaagagctatgtttaaacgtgcaagcgctactagacaattcagtacattaaaaacgtccgcaatgtgttattaagttgtctaagcgtcaatttgtttacaccacaatatatcctgcca

SEQ ID NO: 344 - DNA, 21096 bp, synthetic construct
  misc_feature 1..21096: note = PHV00002
  source 1..21096: mol_type = other DNA
gtttacccgccaatatatcctgtcaaacactgcggccgcacttgaccgcggatggagccggagctgtggtgaggccatcgacgggaggtgggggagaacacagtctcagtgttctttgtgagtccgcaaggtttttagcttttctgtattaattaaggttgctgttggctgtagaatacggtcgtggaagagctgtatcggtagctactacgtaagctattatatactggaagtctggagctcgtcgatctccggtcgtcttcctccatttctcctcgtcttgctttgactgctgctaccatttgcttctgttttctgatgaagcatgccatgtcggccaccagtgtttgtgtggtttttgcagggaatggctttcaagtgctgtgattgaatggccctcgtcgtcctcggctgagctcacatggacgcgtcatgtgagtgagatatatgatcatatgatgagtggggttcgggtgagtgcgtacttgaagtaggatcccgctttcactcattcattcattggcctttaaaccgggaaattttcgcgaggagatggagggaagcaagcagggtgacgagtgcagagtgccgcgagcgctttgtcaaaaggcaccgccgtaggcaaaaaaatcaatggccctgactgactcgatggtagtactactgtagagactagagagggttgctccccatatcttcgtgtgacttttactccagcattgcatttccgtcattgagacgttaattaatagcagctttcgggacagatgactgtggccatgtttcgtcacggccgcttcgtgccagctgggggtactatagtactgtgattttgttagtaaaaactttcattaggccaccattgacgaccgggccttcgcttttgctgcgctaattaaccatttcccggcgaccgaagggaacatgaacatgccccgacacatgagggcatgaggactagtgttctccctgtcgttcgttgacttgactagtgatagtttaaacgctcttcaactggaagagcggttactaccggttcactagctagctgctaatcgagctagttaccctatgaggtgacatgaagcgctcacggttactatgacggttagcttcacgactgttggtggcagtagcgtacgacttagctatagttccggacttacctagctaataacttcgtatagcatacattatacgaagttatggttaccgagctgtctggtaattattggctgtaggattctaaacagagcctaaatagctggaatagctctagccctcaatccaaactaatgatatctatacttatgcaactctaaatttttattctaaaagtaatatttcatttttgtcaacgagattctctactctattccacaatcttttgaagctatatttaccttaaatctgtactctataccaataatcatatattctattatttatttttatctctctcctaaggagcatccctctatgtctgcatggcccccgcctcgggtcccaatctcttgctctgctagtagcacagaagaaaacactagaaatgacttgcttgacttagagtatcagataaacatcatgtttacttaactttaatttgtatcggtttctactatttttataatatttttgtctctatagatactacgtgcaacagtataatcaacctagtttaatccagagcgaaggattttttactaagtacgtgactccatatgcacagcgttccttttatggttcctcactgggcacagcataaacgaaccctgtccaatgttttcagcgcgaacaaacagaaattccatcagcgaacaaacaacatacatgcgagatgaaaataaataataaaaaaagctccgtctcgataggccggcacgaatcgagagcctccatagccagttttttccatcggaacggcggttcgcgcacctaattatatgcaccacacgcctataaagccaaccaacccgtcggaggggcgcaagccagacagaagacagcccgtcagcccctctcgtttttcatccgccttcgcctccaaccgcgtgcgctccacgcctcctccaggaaagcgagaggtacggcgatcgatcatcccccctccttctctctaccttcttttctctagactacatcggatggcgatccttggttagggcctgctagtttcccttcctgttttgtcgatggctgcgaggcacaatagatctgatggcgttatgacggctaacttgtcatgttgttgcgatttatagtccctttaggagatcagtttaatttctcggatggttcgagatcggtggtccttggttagtaccctaagatccgcgctgttagggttcgtagatggaggcgacctgttctgattcttaacttgtcagtacctgggaaatcctgggatggttctagctcgtccgcagatgagatcgatttcatgatcctctgtatcttgtttcgttgcctaggttccgtctaatctatccgtggtatgatgtagatgttttgatcgtgctaactacgtcttgtaaagttaattgtcaggtcataatttttagcatgcctttttttttgtttggttttgtctaattgggctgtcgttctagatcagagtagaagactgttccaaactacctgctggatttattgaacttggatctgtatgtgtgtcacatatcttcataaattcatgattaagatggattgaaatatcttttatctttttggtatggatagttctatatgttggtgtggctttgttagatgtatacatgcttagatacatgaagcaacgtgctgctactgtttagtaattgctgttcatttgtctaataaacagataaggatatgtatttatgttgctgttggttttgctggtactttgttggatacaaatgcttcaatacagaaaacagcatgctgctacgatttaccatttatctaatcttatcatatgtctaatctaataaacaaacatgcttttaaattatcttcatatgcttggatgatggcatacacagcggctatgtgtggttttttaaatacccagcatcatgggcatgcatgacactgctttaatatgctttttatttgcttgagactgtttcttttgtttatactgaccctttagttcggtgactcttctgcaggtccactttaacttagccttggagccatgaaagcgctcaccgcccgccaacaggaggtcttcgacctgatcagggatcacatctcccagacaggcatgccaccaacaagggcggaaatcgcacagaggctcgggtttcgctcgccaaacgctgccgaggagcaccttaaggcgctcgcgcgcaaaggcgttatcgagattgtgagcggagccagccgcggaatcaggctcttacaggaggaggaagagggacttccacttgtgggcagagtggccgctgacgaaccactccttgcccagcagcacatcgaaggacactaccaggtcgacccatccctgttcaagccaaacgccgatttcctcctccgcgtgtccgggatggcgatgaaagacatcggcatcatggacggcgacctgctggccgtccataaaactcaggacgtgcgcaacggccaggtggtggtggcccgcatcgacgatgaggtcacggtgaaacgcctcaagaagcagggcaataaagtggagctcctccccgaaaatagcgagttcaaaccaatcgtggtcgaccttcggcaacagtctttcacgattgagggcctggcggtgggcgttatcaggaacggcgattggcttggaggatccagctccccgccacccccgccaccgccaccgcccccgacctgcgccaaggacatccagaaagcagccgccgaagcggccctcgccttccaagacgagacgtgcgatacaaccaccacgaatcatggcctcgatatggaggaaacgatggtcgaagccatctacaccccagagcagtcagaaggcgccttctacatggacgaggaaaccatgttcggcatgccgaccctcctcgacaacatggccgaaggaatgctcctcccacctccctcagttcagtggaaccacaactacgacggcgaaggcgacggagacgtttccctgtggagctactagctcgaggtttttctcagacagttttctaaaaaaagggcgtttctggggaagttcgagatggttcgtaaggtgttactggctcctgtgaaccaatacatgatactgccatgataagggttataattagtcaagcagagtaagaagaaacaacagtagcagtgactccgattcctgaagatgagtcatatttgtcttgtgctcctgctgtatgaaatggatcgcatgtgtatattcgtcgccgcgccgcactggtgtaacctgttgcctcagagtttgcttttagctggttctgttttaaaaataagtactgttttttggttggctgcaagccattctgaacttcagtttaccaattgtttttatgttgtggttgaatattttaattttttatttaatgtttggttctttttttatatatatttgcaaaaatgatacaagtggtcaagttttcatatagtatgggctctatttcctagagctctacctctaggaacgaattttgtggaggttttcttttggctagttaggcaaagtccccatatcttgcaggctaaatcaagaagaagctctgtcaaacagttttttttactgaaaagtgattaaagagtagtttctcctagatcacttcagagtttatcctagagaatcatgggaatcaaattcagttagaggatcatttcttacaaagaatcaactttcgtagagaatctaaagcagaaagagctttgacaaacttacccttagagcaattccaacattctcgcgtgagtttcttcgcgccgttgttttgcggtgacttcatctggacgtcccgcgacatagagacgcttgtattgatcatgagagcttgtgtggtcatacacaatataattgttaaagatgaaagagatgtggaccttaatgagcgattcgactttgatggtgaaaatgtgcaaccttctcatggtatttctactcgcacactagctgaatttattgaagctcataaaaagatccgagacaaagaaatacattttcaattgaaagaagacctaatcaagcacttatggtgtacacccgggaagcttggcgcgccggtcacccggtccgggcctagaaggccacccgggccccgtccactaactaatcgttaagcgggtttcccgttagctaagcactaggccggaatccccaagtttgtacaaaaaagcaggctccggccagaatggcccggaccgggttaccgaattgctaactaactagaattctgtacaaccggtctaactaactagcaattcgcccttgatactgtatatactcacagtatcatatgatactgtatatactcacagtatcatatgatactgtatatactcacagtataagggcgaattggcccttgatactgtatatactcacagtatcatatgatactgtatatactcacagtatcatatgatactgtatatactcacagtataagggcgaattgctgcagcccgggacaatcccactatccttcgcaagacccttcctctatataaggaagttcatttcatttggagaggactatttttacaacaattttacaattacaccggtaatggccactgtgaacaactggctcgctttctccctctccccgcaggagctgccgccctcccagacgacggactccacactcatctcggccgccaccgccgaccatgtctccggcgatgtctgcttcaacatcccccaagattggagcatgaggggatcagagctttcggcgctcgtcgcggagccgaagctggaggacttcctcggcggcatctccttctccgagcagcatcacaaggccaactgcaacatgatacccagcactagcagcacagtttgctacgcgagctcaggtgctagcaccggctaccatcaccagctgtaccaccagcccaccagctcagcgctccacttcgcggactccgtaatggtggcttcctcggccggtgtccacgacggcggtgccatgctcagcgcggccgccgctaacggtgtcgctggcgctgccagtgccaacggcggcggcatcgggctgtccatgattaagaactggctgcggagccaaccggcgcccatgcagccgagggtggcggcggctgagggcgcgcaggggctctctttgtccatgaacatggcggggacgacccaaggcgctgctggcatgccacttctcgctggagagcgcgcacgggcgcccgagagtgtatcgacgtcagcacagggtggagccgtcgtcgtcacggcgccgaaggaggatagcggtggcagcggtgttgccggcgctctagtagccgtgagcacggacacgggtggcagcggcggcgcgtcggctgacaacacggcaaggaagacggtggacacgttcgggcagcgcacgtcgatttaccgtggcgtgacaaggcatagatggactgggagatatgaggcacatctttgggataacagttgcagaagggaagggcaaactcgtaagggtcgtcaagtctatttaggtggctatgataaagaggagaaagctgctagggcttatgatcttgctgctctgaagtactggggtgccacaacaacaacaaattttccagtgagtaactacgaaaaggagctcgaggacatgaagcacatgacaaggcaggagtttgtagcgtctctgagaaggaagagcagtggtttctccagaggtgcatccatttacaggggagtgactaggcatcaccaacatggaagatggcaagcacggattggacgagttgcagggaacaaggatctttacttgggcaccttcagcacccaggaggaggcagcggaggcgtacgacatcgcggcgatcaagttccgcggcctcaacgccgtcaccaacttcgacatgagccgctacgacgtgaagagcatcctggacagcagcgccctccccatcggcagcgccgccaagcgcctcaaggaggccgaggccgcagcgtccgcgcagcaccaccacgccggcgtggtgagctacgacgtcggccgcatcgcctcgcagctcggcgacggcggagccctggcggcggcgtacggcgcgcactaccacggcgccgcctggccgaccatcgcgttccagccgggcgccgccagcacaggcctgtaccacccgtacgcgcagcagccaatgcgcggcggcgggtggtgcaagcaggagcaggaccacgcggtgatcgcggccgcgcacagcctgcaggacctccaccacctgaacctgggcgcggccggcgcgcacgactttttctcggcagggcagcaggccgccgccgctgcgatgcacggcctgggtagcatcgacagtgcgtcgctcgagcacagcaccggctccaactccgtcgtctacaacggcggggtcggcgacagcaacggcgccagcgccgtcggcggcagtggcggtggctacatgatgccgatgagcgctgccggagcaaccactacatcggcaatggtgagccacgagcaggtgcatgcacgggcctacgacgaagccaagcaggctgctcagatggggtacgagagctacctggtgaacgcggagaacaatggtggcggaaggatgtctgcatgggggactgtcgtgtctgcagccgcggcggcagcagcaagcagcaacgacaacatggccgccgacgtcgggcatggcggcgcgcagctcttcagtgtctggaacgacacttaaccgttaacagctgctgctgttctagggttcacaagtctgcctatttgtcttccccaatggagctatggttgtctggtctggtccttggtcgtgtcccgtttcattgtgtactatttacctgtaatgtgtatccttaagtctggtttgatggtgtctgaaacgttttgctgtggtagagcagcatggaagaactataatgaataagtgatccctaatcattgtgtccaaattttgcttctgctatacccttttgtgctgtttcttatgttttgcttaaaaatttgatctgacaaacaaatttgtctaaattatgctcttgttctgactgtgtactgtacacatttgtattgctaccggtttggcacatagttttctctttgattgcagatcaaacccttctgattgcagattgcttggctatggctgatgtgctcactgttcttctttagcttgtatattgctgatggtggcttggctacggctgaaaaagttgctgctgcgccgacttggcaactgttgctccagtaatgctttgtcctctcttcctagccgccgacttggcacttggcagctgttgctcctgtaatgcgttgttatctcttatctcttgagatgtactatgattttgaggctgtttgacttgtgccagattgccagtgctgatgctatattatctcaggtttttatgctagtatatgttttactgtgtgctgcctgtgtcgagttacgtaatctattgaaccgctatgcgtgttgatgccctgttgttgcttgccagattgatgcccctgttgcttgcagcttgcaagctgtagtgaaatcctaaaattccaaaccaaatctattctgaacttttgaagatctgtgatgtccggaagaaaagattcaaacagataaacgggactctccagaatctataaaataaatgatcgacaaacgctttgctttggtaggcttcggcgcgccggtcacccggtccgggcctagaaggccacccggggcacttaggagcgaagactaacggttagctagggctgatacctaaaccttagtcactagcagcgtctactagctaccaagcggccgcacgtcacggtcactacgaatcgaccgaagcttgcatgggccgcggcgcgccgcgacttattgaactagtctagggcgcggctaacaacctagcttagattgccttgtctaaacccttaggctaacgcgccactctagaaggccgatctcccccgaacgcgccagatccgatatcgatgggccctggccgaagcttggtcacccgcaccttgctagttggatattacctcttctcttcaaagtatccttgaacgctcaccggttatcaaatctctacactatagctctgtagtcttgctagatagttagttctttagctctctctagaggttcacaaactcaatacaacacacagtggagtagggtattacgctccggcggcccgaaccactctaaatccttgtgtcctcgtgtgctcttccaccattaatgactgtaattgcagggacacgaagagttgtagcgcttttgccaacaagatccgctatatgctagtagagtggaacctgcacagcaacaagcatccaataatctgagaataagaattatgtgtggtgatggttctcatctctgcaactcgccattttcgcgagagaaccaaatccaagttggtgaagatcatgatttgggctcatgggctggcatagtagctattacctttgcaattgtggttcgaatctatccgatattctccttttcagggagagctaatgcttatgcttattgggtattttggtttgacactgcttcacgcccaaaaaaaggcaactatgtctgagttggatatggcccaaaaaaaggcagctatgtctgagttggatatggaagtcttctttcgtttagggtgaagtaagaccaagctcatgagcttattatcttaggtcggaacaaattagttgataggcatggcacatttatcaaattataatgattttaacagaaaagcaacacctctttttcagcagcaccagctttgcaagctgcaattgacactccaagcatagtatttgctccaaactcagcctgcatttcgcacaatatcatatctatttccatttggataaaatatattttccagaaatatgggaacagaatcaagatacagaaaaaagttgtggtagtagtggtaagtggaaacacaagtacagtgaaaagatagcattatttctgaacagtcaaattaaccgaaataagtagtatcacatactgcccctaaattgactacacccaatgtaaagaattgcttgagcatattgagccatcagttgtttgtttgtgtaacggatttgacaatgcagagttcaggagcaaaaaaccgcaaaggagagaaagagggaaaggatctcctagtatcccaccttgtggcgcgccctgtcaagtgcatgatggcctggtcgatctgcgtctgctgctgcggttccatcccaacgagtgcctccgacaccttgtcgttgatcacccgcaccgcgtaggcgacccccctggcgaggaacttccgcctctcggaggccccggccgcgtcggcggcggcgccctcgagcgcgcccacgctagccgtagatgctcggtgcacggccttgttggtgtgcaactcgacctcaacggccggtgcgctacgcccgtcaaggatctggcgcgcccgcaccctcgtgatcacggtgggcgcctcccgcctcatgtggccgacgatgaaaagcgccgggttaggggccttggcgcgcaccgccgtattcagggcctcctcgctcttgcgcgagagcaggtgcttccccaggtactcctgcactgacaaggctgccacagcggtggaatttgtcctcacgacttcgccacgtcgtcctcacctccctggcttcccacgactccgccgtatcgaggtgctcggtgggtcgtcttaatccgaagtccgaactaggaagacgagacagagaggtctgaggaatgggcctcgtttgatgttgagctgaattatttttccagcataagcccaggtcttggtccatgaacaaaattactagaaacccagcccagtactacgatctaaaagagggactgccactggatagctctctctagcattctccacgctccaatacagcggcgtcgtgtctatccgggtctatccgcgaacacgtgagaactctccagaaactgctttctcctccacttcatctctctcgctttccctctataaaaagaccccttctaggaattgagggagacagcaagcaccaagcagcgatccgaagctcaatcaattcactcaaacctcttccccaaatcttcgattagatcttcgttgacaagaagactagaaccgaacctgacatgtccaacctgctcacggttcaccagaaccttccggctcttccagtggacgcgacgtccgatgaagtcaggaagaacctcatggacatgttccgcgacaggcaagcgttcagcgagcacacctggaagatgctgctctccgtctgccgctcctgggctgcatggtgcaagctgaacaacaggaagtggttccccgctgagcccgaggacgtgagggattaccttctgtacctgcaagcgcgaggtttgtttctgcttctacctttgatatatatataataattatcattaattagtagtaatataatatttcaaatatttttttcaaaataaaagaatgtagtatatagcaattgcttttctgtagtttataagtgtgtatattttaatttataacttttctaatatatgaccaaaacatggtgatgcctaggtctggcagtgaagaccatccagcaacaccttggacaactgaacatgcttcacaggcgctccggcctcccgcgccccagcgactcgaacgccgtgagcctcgtcatgcgccgcatcaggaaggaaaacgtcgatgccggcgaaagggcaaagcaggccctcgcgttcgagaggaccgatttcgaccaggtccgcagcctgatggagaacagcgacaggtgccaggacattaggaacctggcgttcctcggaattgcatacaacacgctcctcaggatcgcggaaattgcccgcattcgcgtgaaggacattagccgcaccgacggcggcaggatgcttatccacattggcaggaccaagacgctcgtttccaccgcaggcgtcgaaaaggccctcagcctcggagtgaccaagctcgtcgaacgctggatctccgtgtccggcgtcgcggacgacccaaacaactacctcttctgccgcgtccgcaagaacggggtggctgcccctagcgccaccagccaactcagcacgagggccttggaaggtattttcgaggccacccaccgcctgatctacggcgcgaaggatgacagcggtcaacgctacctcgcatggtccgggcactccgcccgcgttggagctgctagggacatggcccgcgccggtgtttccatccccgaaatcatgcaggcgggtggatggacgaacgtgaacattgtcatgaactacattcgcaaccttgacagcgagacgggcgcaatggttcgcctcctggaagatggtgactgaggtacccaacctagacttgtccatcttctggattggccaacttaattaatgtatgaaataaaaggatgcacacatagtgacatgctaatcactataatgtgggcatcaaagttgtgtgttatgtgtaattactagttatctgaataaaagagaaagagatcatccatatttcttatcctaaatgaatgtcacgtgtctttataattctttgatgaaccagatgcatttcattaaccaaatccatatacatataaatattaatcatatataattaatatcaattgggttagcaaaacaaatctagtctaggtgtgttttgcgatccgatatcgacgtctaaaaacggcccctaactaacgcttagttgcccgctagattagtcccccgttagtgcctagttagacacacgacgaactaggggctagtgccaccttgctagttggatattacctcttctcttcaaagtatccttgaacgctcaccggttatcaaatctctacactatagctctgtagtcttgctagatagttagttctttagctctcgcacgataacttcgtatagcatacattatacgaagttataacagcggaccgggttaccgaattcctgcccttaaggccaattgttcaagattcattcaacaattgaaacatctcccatgattaaatcagtataaggttgctatggtcttgcttgacaaagtttttttttgagggaatttcaactaaatttttgagtgaaactatcaaatactgattttaaaaaatttttataaaaggaagcgcagagataaaaggccatctatgctacaaaagtacccaaaaatgtaatcctaaagtatgaattgcattttttttttgtttggacgaaaggaaaggagtattaccacaagaatgatatcatcttcatatttagatcttttttgggtaaagcttgagattctctaaatatagagaaatcagaagaaaaaaaaaccgtgttttggtggttttgatttctagcctccacaataactttgacggcgtcgacaagtctaacggacaccaagcagcgaaccaccagcgccgagccaagcgaagcagacggccgagacgttgacaccttcggcgcggcatctctcgagagttccgctccggcgctccacctccaccgctggcggtttcttattccgttccgttccgcctcctgctctgctcctctccacaccacacggcacgaaaccgttacggcaccggcagcacccagcacgggagaggggattcctttcccaccgttccttccctttccgccccgccgctataaatagccagccccatccccagcttttttccccaatctcatctcctctctcctgttgttcggagcacacgcacaatccgatcgatccccaaatccccttcgtctctcctcgcgagcctcgtggatcccagcttcaaggtacggcgatcgatcatcccccctccttctctctaccttcttttctctagactacatcggatggcgatccatggttagggcctgctagtttcccttcctgttttgtcgatggctgcgaggcacaatagatctgatggcgttatgacggctaacttgtcatgttgttgcgatttatagtccctttaggagatcagtttaatttctcggatggttcgagatcggtggtccatggttagtaccctaagatccgcgctgttagggttcgtagatggaggcgacctgttctgattgttaacttgtcagtacctgggaaatcctgggatggttctagctcgtccgcagatgagatcgatttcatgatcctctgtatcttgtttcgttgcctaggttccgtctaatctatccgtggtatgatgtagatgttttgatcgtgctaactacgtcttgtaaagttaattgtcaggtcataatttttagcatgcctttttttttgtttggttttgtctaattgggctgtcgttctagatcagagtagaagactgttccaaactacctgctggatttattgaacttggatctgtatgtgtgtcacatatcttcataaattcatgattaagatggattgaaatatcttttatctttttggtatggatagttctatatgttggtgtggctttgttagatgtatacatgcttagatacatgaagcaacgtgctgctactgtttagtaattgctgttcatttgtctaataaacagataaggatatgtatttatgttgctgttggttttgctggtactttgttggatacaaatgcttcaatacagaaaacagcatgctgctacgatttaccatttatctaatcttatcatatgtctaatctaataaacaaacatgcttttaaattatcttcatatgcttggatgatggcatacacagcggctatgtgtggttttttaaatacccagcatcatgggcatgcatgacactgctttaatatgctttttatttgcttgagactgtttcttttgtttatactgaccctttagttcggtgactcttctgcaggtcgactttaacttagcctaggatccatggcccagtccaagcacggcctgaccaaggagatgaccatgaagtaccgcatggagggctgcgtggacggccacaagttcgtgatcaccggcgagggcatcggctaccccttcaagggcaagcaggccatcaacctgtgcgtggtggagggcggccccttgcccttcgccgaggacatcttgtccgccgccttcatgtacggcaaccgcgtgttcaccgagtacccccaggacatcgtcgactacttcaagaactcctgccccgccggctacacctgggaccgctccttcctgttcgaggacggcgccgtgtgcatctgcaacgccgacatcaccgtgagcgtggaggagaactgcatgtaccacgagtccaagttctacggcgtgaacttccccgccgacggccccgtgatgaagaagatgaccgacaactgggagccctcctgcgagaagatcatccccgtgcccaagcagggcatcttgaagggcgacgtgagcatgtacctgctgctgaaggacggtggccgcttgcgctgccagttcgacaccgtgtacaaggccaagtccgtgccccgcaagatgcccgactggcacttcatccagcacaagctgacccgcgaggaccgcagcgacgccaagaaccagaagtggcacctgaccgagcacgccatcgcctccggctccgccttgccctccggactcagatctcgatagggtaccaatggccagttaacagatccagctgctgctgttctagggttcacaagtctgcctatttgtcttccccaatggagctatggttgtctggtctggtccttggtcgtgtcccgtttcattgtgtactatttacctgtaatgtgtatccttaagtctggtttgatggtgtctgaaacgttttgctgtggtagagcagcatggaagaactataatgaataagtgatccctaatcattgtgtccaaattttgcttctgctatacccttttgtgctgtttcttatgttttgcttaaaaatttgatctgacaaacaaatttgtctaaattatgctcttgttctgactgtgtactgtacacatttgtattgctaccggtttggcacatagttttctctttgattgcagatcaaacccttctgattgcagattgcttggctatggctgatgtgctcactgttcttctttagcttgtatattgctgatggtggcttggctacggctgaaaaagttgctgctgcgccgacttggcaactgttgctccagtaatgctttgtcctctcttcctagccgccgacttggcacttggcagctgttgctcctgtaatgcgttgttatctcttatctcttgagatgtactatgattttgaggctgtttgacttgtgccagattgccagtgctgatgctatattatctcaggtttttatgctagtatatgttttactgtgtgctgcctgtgtcgagttacgtaatctattgaaccgctatgcgtgttgatgccctgttgttgcttgccagattgatgcccctgttgcttgcagcttgcaagctgtagtgaaatcctaaaattcgaaaccaaatctattctgaacttttgaagatctgtgatgtccggaagaaaagattcaaacagataaacgggactctccagaatctataaaataaatgatcgacaaacgctttgctttggtaggcttcctagttagttagcggaccgaagcttcggtccgggcctgcggccgcagatatcagaacctgcgtctggacgcacaagtcatagcattatcggctaaaatttcttaatttctaaattagtcatatcggctaagaaagtggggagcactatcatttcgtagaacaagaacaaggtatcatatatatatatatatataatatttaaactttgttaagtggaatcaaagtgctagtattaatggagtttcatgtgcattaaattttatgtcacatcagcaattttgttgacttggcaaggtcatttagggtgtgtttggaagacaggggctattaggagtattaaacatagtctaattacaaaactaattgcacaaccgctaagctgaatcgcgagatggatctattaagcttaattagtccatgatttgacaatgtggtgctacaataaccatttgctaatgatggattacttaggtttaatagattcgtctcgtgatttagcctatgggttctgctattaattttgtaattagctcatatttagttcttataattagtatccgaacatccaatgtgacatgctaaagtttaaccctggtatccaaatgaagtcttatgagagtttcatcactccggtggtatatgtacttaggctccgttttcttccaccgacttatttttagcacccgtcacattgaatgtttagatactaattagaagtattaaacgtagactatttacaaaatccattacataagacgaatctaaacggcgagacgaatctattaaacctaattagtccatgatttgacaatgtgttgctacagtaaacatttgctaatgatggattaattaggcttaatagattcgtctcgccgtttagcctccacttatgtaatgggttttctaaacaatctacgtttaatactcctaattagtatctaaatattcaatgtgacacgtgctaaaaataagtcagtggaaggaagagaacgtccccttagttttccatcttattaattgtacgatgaaactgtgcagccagatgattgacaatcgcaatacttcaactagtgggccatgcacatcagcgacgtgtaacgtcgtgagttgctgttcccgtagagaaatatcaactggtgggccacgcacatcagcgtcgtgtaacgtggacggaggagccccgtgacggcgtcgacatcgaacggccaccaaccacggaaccacccgtccccacctctcggaagctccgctccacggcgtcgacatctaacggctaccagcaggcgtacgggttggagtggactccttgcctctttgcgctggcggcttccggaaattgcgtggcggagacgaggcgggctcgtctcacacggcacggaagacgtcacgggttccttccccacctctcctcttccccaccgccataaatagccgaccccctcgcctttctccccaatctcatctcgtctcgtgttgttcggagcacaccacccgccccaaatcgttcttcccgcaagcctcggcgatccttcacccgcttcaaggtacggcgatcgtcttcctcctctagatcggcgtgatctgcaagtagttgatttggtagatggttaggatctgtgcactgaagaaatcatgttagatccgcgatgtttctgttcgtagatggctgggaggtggaatttttgtgtagatctgatatgttctcctgtttatcttgtcacgctcctgcgatttgtggggattttaggtcgttgatctgggaatcgtggggttgcttctaggctgttcgtagatgaggtcgttctcacggtttactggatcattgcctagtagatcagctcgggctttcgtctttgtatatggtgcccatacttgcatctatgatctggttccgtggtgttacctaggtttctgcgcctgattcgtccgatcgattttgttagcatgtggtaaacgtttggtcatggtctgatttagattagagtcgaataggatgatctcgatctagctcttgggattaatatgcatgtgtcaccaatctgttccgtggttaagatgatgaatctatgcttagttaatgggtgtagatatatatgctgctgttcctcaatgatgccgtagcttttacctgagcagcatggatcgtcctgttacttaggtagatgcacatgcttatagatcaagatatgtactgctactgttggaattctttagtatacctgatgatcatccatgctcttgttacttgttttggtatacttggatgatggcatgctgctgctttttgttgatttgagcccatccatatctgcatatgtcacatgattaagatgattacgctgtttctgtatgatgccatagcttttatgtgagcaacatgcatcctcctggttatatgcattaatagatggaagatatctattgctacaatttgatgattattttgtacatacgatgatcaagcatgctcttcatactttgttgatatacttggataatgaaatgctgctgcacgttcattctatagcactaatgatgtgatgaacacgcacgacctgtttgtggcatctgtttgaatgtgttgttgctgttcactagagactgttttattaacctactgctagatacttacccttctgtctgtttattcttttgcagccagaatagcggatccgcccatggtcgaacaggacggcctgcatgcaggatcaccagcggcctgggtcgaaagactcttcggctacgactgggcacaacagaccatcgggtgtagcgacgcagctgttttcaggctgtccgcacagggcagacccgttttgttcgtcaaaacagacctgtctggcgcgctcaacgaactgcaagacgaggccgcaagactgagctggcttgctaccacaggcgttccttgtgctgcagtcctcgacgtcgttactgaggctggaagagactggctgctcctgggtgaagtcccaggacaggaccttttgtccagccatctggcacctgccgaaaaggtcagcatcatggcagacgccatgagaaggctgcacacactcgaccctgcaacatgccccttcgatcaccaggcaaaacacaggatcgagcgcgcaagaacgcgcatggaggctggtttggtcgaccaagatgacctcgacgaggaacaccaaggactggctcctgctgaactcttcgccagactcaaggcgagaatgccagacggtgacgacctggtcgtcacacacggcgacgcttgtctcccaaacataatggtcgagaacggacgcttcagcggtttcatcgactgcggtagactcggagtcgctgacagataccaggacatcgccctggcaacacgcgacatcgcagaggaactcggaggcgaatgggctgacaggtttctcgtgctctacggtatcgctgctccagacagccagaggatcgcattctacaggctcctcgacgagttcttttagttcgaacggtacccggggatcctctagtgccgtgggtcgtttaagctgccgctgtacctgtgtcgtctggtgccttctggtgtacctgggaggttgtcgtctatcaagtatctgtggttggtgtcatgagtcagtgagtcccaatactgttcgtgtcctgtgtgcattatacccaaaactgttatgggcaaatcatgaataagcttgatgttcgaacttaaaagtctctgctcaatatggtattatggttgtttttgttcgtctcctaatatttgcctgggatcaaattttattggctggtgttcatttgacctccatgttcttgctaggctccattttttactctacagccataatatgtttgattgtttggtttgttctttgttgtacacctggttctgtcgagcttagttttcgacactggcttacagcttaacatgttgctattttattgggttctgattgctattttattgggttctgattgctagtttttgctgaatccaaaaaccatgttatttatttaagcgatccaggttattattatgatggtggctaagtttttttttttccaagggtaaattttctggattctccagtgtttctgtggccgaattcaatcactagagtcgacctgcatgattccgatgacttcgtaggttcctagctcaagccgctcgtgtccaagcgtcacttacgattagctaatgattacggcatctaggaccgactagctagctagctaagagctcggtaccgagctcgaattcattccgattaatcgtggcctcttgctcttcaggatgaagagctatgtttaaacgtgcaagcgctactagacaattcagtacattaaaaacgtccgcaatgtgttattaagttgtctaagcgtcaatttgtttacaccacaatatatcctgcca

SEQ ID NO: 345 - DNA, 21096 bp, synthetic construct; identical to SEQ ID NO: 344
  misc_feature 1..21096: note = PHV00003
  source 1..21096: mol_type = other DNA

SEQ ID NO: 346 - DNA, 19872 bp, synthetic construct
  misc_feature 1..19872: note = PHV00004
  source 1..19872: mol_type = other DNA
gtttacccgccaatatatcctgtcaaacactgcggccgcacttgaccgcggatggagccggagctgtggtgaggccatcgacgggaggtgggggagaacacagtctcagtgttctttgtgagtccgcaaggtttttagcttttctgtattaattaaggttgctgttggctgtagaatacggtcgtggaagagctgtatcggtagctactacgtaagctattatatactggaagtctggagctcgtcgatctccggtcgtcttcctccatttctcctcgtcttgctttgactgctgctaccatttgcttctgttttctgatgaagcatgccatgtcggccaccagtgtttgtgtggtttttgcagggaatggctttcaagtgctgtgattgaatggccctcgtcgtcctcggctgagctcacatggacgcgtcatgtgagtgagatatatgatcatatgatgagtggggttcgggtgagtgcgtacttgaagtaggatcccgctttcactcattcattcattggcctttaaaccgggaaattttcgcgaggagatggagggaagcaagcagggtgacgagtgcagagtgccgcgagcgctttgtcaaaaggcaccgccgtaggcaaaaaaatcaatggccctgactgactcgatggtagtactactgtagagactagagagggttgctccccatatcttcgtgtgacttttactccagcattgcatttccgtcattgagacgttaattaatagcagctttcgggacagatgactgtggccatgtttcgtcacggccgcttcgtgccagctgggggtactatagtactgtgattttgttagtaaaaactttcattaggccaccattgacgaccgggccttcgcttttgctgcgctaattaaccatttcccggcgaccgaagggaacatgaacatgccccgacacatgagggcatgaggactagtgttctccctgtcgttcgttgacttgactagtgatagtttaaacgctcttcaactggaagagcggttactaccggttcactagctagctgctaatcgagctagttaccctatgaggtgacatgaagcgctcacggttactatgacggttagcttcacgactgttggtggcagtagcgtacgacttagctatagttccggacttacctagctaataacttcgtatagcatacattatacgaagttatggttaccgagctgtctggtaattattggctgtaggattctaaacagagcctaaatagctggaatagctctagccctcaatccaaactaatgatatctatacttatgcaactctaaatttttattctaaaagtaatatttcatttttgtcaacgagattctctactctattccacaatcttttgaagctatatttaccttaaatctgtactctataccaataatcatatattctattatttatttttatctctctcctaaggagcatccctctatgtctgcatggcccccgcctcgggtcccaatctcttgctctgctagtagcacagaagaaaacactagaaatgacttgcttgacttagagtatcagataaacatcatgtttacttaactttaatttgtatcggtttctactatttttataatatttttgtctctatagatactacgtgcaacagtataatcaacctagtttaatccagagcgaaggattttttactaagtacgtgactccatatgcacagcgttccttttatggttcctcactgggcacagcataaacgaaccctgtccaatgttttcagcgcgaacaaacagaaattccatcagcgaacaaacaacatacatgcgagatgaaaataaataataaaaaaagctccgtctcgataggccggcacgaatcgagagcctccatagccagttttttccatcggaacggcggttcgcgcacctaattatatgcaccacacgcctataaagccaaccaacccgtcggaggggcgcaagccagacagaagacagcccgtcagcccctctcgtttttcatccgccttcgcctccaaccgcgtgcgctccacgcctcctccaggaaagcgagaggtacggcgatcgatcatcccccctccttctctctaccttcttttctctagactacatcggatggcgatccttggttagggcctgctagtttcccttcctgttttgtcgatggctgcgaggcacaatagatctgatggcgttatgacggctaacttgtcatgttgttgcgatttatagtccctttaggagatcagtttaatttctcggatggttcgagatcggtggtccttggttagtaccctaagatccgcgctgttagggttcgtagatggaggcgacctgttctgattcttaacttgtcagtacctgggaaatcctgggatggttctagctcgtccgcagatgagatcgatttcatgatcctctgtatcttgtttcgttgcctaggttccgtctaatctatccgtggtatgatgtagatgttttgatcgtgctaactacgtcttgtaaagttaattgtcaggtcataatttttagcatgcctttttttttgtttggttttgtctaattgggctgtcgttctagatcagagtagaagactgttccaaactacctgctggatttattgaacttggatctgtatgtgtgtcacatatcttcataaattcatgattaagatggattgaaatatcttttatctttttggtatggatagttctatatgttggtgtggctttgttagatgtatacatgcttagatacatgaagcaacgtgctgctactgtttagtaattgctgttcatttgtctaataaacagataaggatatgtatttatgttgctgttggttttgctggtactttgttggatacaaatgcttcaatacagaaaacagcatgctgctacgatttaccatttatctaatcttatcatatgtctaatctaataaacaaacatgcttttaaattatcttcatatgcttggatgatggcatacacagcggctatgtgtggttttttaaatacccagcatcatgggcatgcatgacactgctttaatatgctttttatttgcttgagactgtttcttttgtttatactgaccctttagttcggtgactcttctgcaggtccactttaacttagccttggagccatgaaagcgctcaccgcccgccaacaggaggtcttcgacctgatcagggatcacatctcccagacaggcatgccaccaacaagggcggaaatcgcacagaggctcgggtttcgctcgccaaacgctgccgaggagcaccttaaggcgctcgcgcgcaaaggcgttatcgagattgtgagcggagccagccgcggaatcaggctcttacaggaggaggaagagggacttccacttgtgggcagagtggccgctgacgaaccactccttgcccagcagcacatcgaaggacactaccaggtcgacccatccctgttcaagccaaacgccgatttcctcctccgcgtgtccgggatggcgatgaaagacatcggcatcatggacggcgacctgctggccgtccataaaactcaggacgtgcgcaacggccaggtggtggtggcccgcatcgacgatgaggtcacggtgaaacgcctcaagaagcagggcaataaagtggagctcctccccgaaaatagcgagttcaaaccaatcgtggtcgaccttcggcaacagtctttcacgattgagggcctggcggtgggcgttatcaggaacggcgattggcttggaggatccagctccccgccacccccgccaccgccaccgcccccgacctgcgccaaggacatccagaaagcagccgccgaagcggccctcgccttccaagacgagacgtgcgatacaaccaccacgaatcatggcctcgatatggaggaaacgatggtcgaagccatctacaccccagagcagtcagaaggcgccttctacatggacgaggaaaccatgttcggcatgccgaccctcctcgacaacatggccgaaggaatgctcctcccacctccctcagttcagtggaaccacaactacgacggcgaaggcgacggagacgtttccctgtggagctactagctcgaggtttttctcagacagttttctaaaaaaagggcgtttctggggaagttcgagatggttcgtaaggtgttactggctcctgtgaaccaatacatgatactgccatgataagggttataattagtcaagcagagtaagaagaaacaacagtagcagtgactccgattcctgaagatgagtcatatttgtcttgtgctcctgctgtatgaaatggatcgcatgtgtatattcgtcgccgcgccgcactggtgtaacctgttgcctcagagtttgcttttagctggttctgttttaaaaataagtactgttttttggttggctgcaagccattctgaacttcagtttaccaattgtttttatgttgtggttgaatattttaattttttatttaatgtttggttctttttttatatatatttgcaaaaatgatacaagtggtcaagttttcatatagtatgggctctatttcctagagctctacctctaggaacgaattttgtggaggttttcttttggctagttaggcaaagtccccatatcttgcaggctaaatcaagaagaagctctgtcaaacagttttttttactgaaaagtgattaaagagtagtttctcctagatcacttcagagtttatcctagagaatcatgggaatcaaattcagttagaggatcatttcttacaaagaatcaactttcgtagagaatctaaagcagaaagagctttgacaaacttacccttagagcaattccaacattctcgcgtgagtttcttcgcgccgttgttttgcggtgacttcatctggacgtcccgcgacatagagacgcttgtattgatcatgagagcttgtgtggtcatacacaatataattgttaaagatgaaagagatgtggaccttaatgagcgattcgactttgatggtgaaaatgtgcaaccttctcatggtatttctactcgcacactagctgaatttattgaagctcataaaaagatccgagacaaagaaatacattttcaattgaaagaagacctaatcaagcacttatggtgtacacccgggaagcttggcgcgccggtcacccggtccgggcctagaaggccacccgggccccgtccactaactaatcgttaagcgggtttcccgttagctaagcactaggccggaatccccaagtttgtacaaaaaagcaggctccggccagaatggcccggaccgggttaccgaattgctaactaactagaattctgtacaaccggtctaactaactagcaattcgcccttgatactgtatatactcacagtatcatatgatactgtatatactcacagtatcatatgatactgtatatactcacagtataagggcgaattggcccttgatactgtatatactcacagtatcatatgatactgtatatactcacagtatcatatgatactgtatatactcacagtataagggcgaattgctgcagcccgggacaatcccactatccttcgcaagacccttcctctatataaggaagttcatttcatttggagaggactatttttacaacaattttacaattacaccggtaatggcggccaatgcgggcggcggtggagcgggaggaggcagcggcagcggcagcgtggctgcgccggcggtgtgccgccccagcggctcgcggtggacgccgacgccggagcagatcaggatgctgaaggagctctactacggctgcggcatccggtcgcccagctcggagcagatccagcgcatcaccgccatgctgcggcagcacggcaagatcgagggcaagaacgtcttctactggttccagaaccacaaggcccgcgagcgccagaagcgccgcctcaccagcctcgacgtcaacgtgcccgccgccggcgcggccgacgccaccaccagccaactcggcgtcctctcgctgtcgtcgccgccgccttcaggcgcggcgcctccctcgcccaccctcggcttctacgccgccggcaatggcggcggatcggctgtgctgctggacacgagttccgactggggcagcagcggcgctgctatggccaccgagacatgcttcctgcaggactacatgggcgtgacggacacgggcagctcgtcgcagtggccacgcttctcgtcgtcggacacgataatggcggcggccgcggcgcgggcggcgacgacgcgggcgcccgagacgctccctctcttcccgacctgcggcgacgacggcggcagcggtagcagcagctacttgccgttctggggtgccgcgtccacaactgccggcgccacttcttccgttgcgatccaacagcaacaccagctgcaggagcagtacagcttttacagcaacagcaacagcacccagctggccggcaccggcaaccaagacgtatcggcaacagcagcagcagccgccgccctggagctgagcctcagctcatggtgctccccttaccctgctgcagggagtatgtgaccgttaacagctgctgctgttctagggttcacaagtctgcctatttgtcttccccaatggagctatggttgtctggtctggtccttggtcgtgtcccgtttcattgtgtactatttacctgtaatgtgtatccttaagtctggtttgatggtgtctgaaacgttttgctgtggtagagcagcatggaagaactataatgaataagtgatccctaatcattgtgtccaaattttgcttctgctatacccttttgtgctgtttcttatgttttgcttaaaaatttgatctgacaaacaaatttgtctaaattatgctcttgttctgactgtgtactgtacacatttgtattgctaccggtttggcacatagttttctctttgattgcagatcaaacccttctgattgcagattgcttggctatggctgatgtgctcactgttcttctttagcttgtatattgctgatggtggcttggctacggctgaaaaagttgctgctgcgccgacttggcaactgttgctccagtaatgctttgtcctctcttcctagccgccgacttggcacttggcagctgttgctcctgtaatgcgttgttatctcttatctcttgagatgtactatgattttgaggctgtttgacttgtgccagattgccagtgctgatgctatattatctcaggtttttatgctagtatatgttttactgtgtgctgcctgtgtcgagttacgtaatctattgaaccgctatgcgtgttgatgccctgttgttgcttgccagattgatgcccctgttgcttgcagcttgcaagctgtagtgaaatcctaaaattccaaaccaaatctattctgaacttttgaagatctgtgatgtccggaagaaaagattcaaacagataaacgggactctccagaatctataaaataaatgatcgacaaacgctttgctttggtaggcttcggcgcgccggtcacccggtccgggcctagaaggccacccggggcacttaggagcgaagactaacggttagctagggctgatacctaaaccttagtcactagcagcgtctactagctaccaagcggccgcacgtcacggtcactacgaatcgaccgaagcttgcatgggccgcggcgcgccgcgacttattgaactagtctagggcgcggctaacaacctagcttagattgccttgtctaaacccttaggctaacgcgccactctagaaggccgatctcccccgaacgcgccagatccgatatcgatgggccctggccgaagcttggtcacccgcaccttgctagttggatattacctcttctcttcaaagtatccttgaacgctcaccggttatcaaatctctacactatagctctgtagtcttgctagatagttagttctttagctctctctagaggttcacaaactcaatacaacacacagtggagtagggtattacgctccggcggcccgaaccactctaaatccttgtgtcctcgtgtgctcttccaccattaatgactgtaattgcagggacacgaagagttgtagcgcttttgccaacaagatccgctatatgctagtagagtggaacctgcacagcaacaagcatccaataatctgagaataagaattatgtgtggtgatggttctcatctctgcaactcgccattttcgcgagagaaccaaatccaagttggtgaagatcatgatttgggctcatgggctggcatagtagctattacctttgcaattgtggttcgaatctatccgatattctccttttcagggagagctaatgcttatgcttattgggtattttggtttgacactgcttcacgcccaaaaaaaggcaactatgtctgagttggatatggcccaaaaaaaggcagctatgtctgagttggatatggaagtcttctttcgtttagggtgaagtaagaccaagctcatgagcttattatcttaggtcggaacaaattagttgataggcatggcacatttatcaaattataatgattttaacagaaaagcaacacctctttttcagcagcaccagctttgcaagctgcaattgacactccaagcatagtatttgctccaaactcagcctgcatttcgcacaatatcatatctatttccatttggataaaatatattttccagaaatatgggaacagaatcaagatacagaaaaaagttgtggtagtagtggtaagtggaaacacaagtacagtgaaaagatagcattatttctgaacagtcaaattaaccgaaataagtagtatcacatactgcccctaaattgactacacccaatgtaaagaattgcttgagcatattgagccatcagttgtttgtttgtgtaacggatttgacaatgcagagttcaggagcaaaaaaccgcaaaggagagaaagagggaaaggatctcctagtatcccaccttgtggcgcgccctgtcaagtgcatgatggcctggtcgatctgcgtctgctgctgcggttccatcccaacgagtgcctccgacaccttgtcgttgatcacccgcaccgcgtaggcgacccccctggcgaggaacttccgcctctcggaggccccggccgcgtcggcggcggcgccctcgagcgcgcccacgctagccgtagatgctcggtgcacggccttgttggtgtgcaactcgacctcaacggccggtgcgctacgcccgtcaaggatctggcgcgcccgcaccctcgtgatcacggtgggcgcctcccgcctcatgtggccgacgatgaaaagcgccgggttaggggccttggcgcgcaccgccgtattcagggcctcctcgctcttgcgcgagagcaggtgcttccccaggtactcctgcactgacaaggctgccacagcggtggaatttgtcctcacgacttcgccacgtcgtcctcacctccctggcttcccacgactccgccgtatcgaggtgctcggtgggtcgtcttaatccgaagtccgaactaggaagacgagacagagaggtctgaggaatgggcctcgtttgatgttgagctgaattatttttccagcataagcccaggtcttggtccatgaacaaaattactagaaacccagcccagtactacgatctaaaagagggactgccactggatagctctctctagcattctccacgctccaatacagcggcgtcgtgtctatccgggtctatccgcgaacacgtgagaactctccagaaactgctttctcctccacttcatctctctcgctttccctctataaaaagaccccttctaggaattgagggagacagcaagcaccaagcagcgatccgaagctcaatcaattcactcaaacctcttccccaaatcttcgattagatcttcgttgacaagaagactagaaccgaacctgacatgtccaacctgctcacggttcaccagaaccttccggctcttccagtggacgcgacgtccgatgaagtcaggaagaacctcatggacatgttccgcgacaggcaagcgttcagcgagcacacctggaagatgctgctctccgtctgccgctcctgggctgcatggtgcaagctgaacaacaggaagtggttccccgctgagcccgaggacgtgagggattaccttctgtacctgcaagcgcgaggtttgtttctgcttctacctttgatatatatataataattatcattaattagtagtaatataatatttcaaatatttttttcaaaataaaagaatgtagtatatagcaattgcttttctgtagtttataagtgtgtatattttaatttataacttttctaatatatgaccaaaacatggtgatgcctaggtctggcagtgaagaccatccagcaacaccttggacaactgaacatgcttcacaggcgctccggcctcccgcgccccagcgactcgaacgccgtgagcctcgtcatgcgccgcatcaggaaggaaaacgtcgatgccggcgaaagggcaaagcaggccctcgcgttcgagaggaccgatttcgaccaggtccgcagcctgatggagaacagcgacaggtgccaggacattaggaacctggcgttcctcggaattgcatacaacacgctcctcaggatcgcggaaattgcccgcattcgcgtgaaggacattagccgcaccgacggcggcaggatgcttatccacattggcaggaccaagacgctcgtttccaccgcaggcgtcgaaaaggccctcagcctcggagtgaccaagctcgtcgaacgctggatctccgtgtccggcgtcgcggacgacccaaacaactacctcttctgccgcgtccgcaagaacggggtggctgcccctagcgccaccagccaactcagcacgagggccttggaaggtattttcgaggccacccaccgcctgatctacggcgcgaaggatgacagcggtcaacgctacctcgcatggtccgggcactccgcccgcgttggagctgctagggacatggcccgcgccggtgtttccatccccgaaatcatgcaggcgggtggatggacgaacgtgaacattgtcatgaactacattcgcaaccttgacagcgagacgggcgcaatggttcgcctcctggaagatggtgactgaggtacccaacctagacttgtccatcttctggattggccaacttaattaatgtatgaaataaaaggatgcacacatagtgacatgctaatcactataatgtgggcatcaaagttgtgtgttatgtgtaattactagttatctgaataaaagagaaagagatcatccatatttcttatcctaaatgaatgtcacgtgtctttataattctttgatgaaccagatgcatttcattaaccaaatccatatacatataaatattaatcatatataattaatatcaattgggttagcaaaacaaatctagtctaggtgtgttttgcgatccgatatcgacgtctaaaaacggcccctaactaacgcttagttgcccgctagattagtcccccgttagtgcctagttagacacacgacgaactaggggctagtgccaccttgctagttggatattacctcttctcttcaaagtatccttgaacgctcaccggttatcaaatctctacactatagctctgtagtcttgctagatagttagttctttagctctcgcacgataacttcgtatagcatacattatacgaagttataacagcggaccgggttaccgaattcctgcccttaaggccaattgttcaagattcattcaacaattgaaacatctcccatgattaaatcagtataaggttgctatggtcttgcttgacaaagtttttttttgagggaatttcaactaaatttttgagtgaaactatcaaatactgattttaaaaaatttttataaaaggaagcgcagagataaaaggccatctatgctacaaaagtacccaaaaatgtaatcctaaagtatgaattgcattttttttttgtttggacgaaaggaaaggagtattaccacaagaatgatatcatcttcatatttagatcttttttgggtaaagcttgagattctctaaatatagagaaatcagaagaaaaaaaaaccgtgttttggtggttttgatttctagcctccacaataactttgacggcgtcgacaagtctaacggacaccaagcagcgaaccaccagcgccgagccaagcgaagcagacggccgagacgttgacaccttcggcgcggcatctctcgagagttccgctccggcgctccacctccaccgctggcggtttcttattccgttccgttccgcctcctgctctgctcctctccacaccacacggcacgaaaccgttacggcaccggcagcacccagcacgggagaggggattcctttcccaccgttccttccctttccgccccgccgctataaatagccagccccatccccagcttttttccccaatctcatctcctctctcctgttgttcggagcacacgcacaatccgatcgatccccaaatccccttcgtctctcctcgcgagcctcgtggatcccagcttcaaggtacggcgatcgatcatcccccctccttctctctaccttcttttctctagactacatcggatggcgatccatggttagggcctgctagtttcccttcctgttttgtcgatggctgcgaggcacaatagatctgatggcgttatgacggctaacttgtcatgttgttgcgatttatagtccctttaggagatcagtttaatttctcggatggttcgagatcggtggtccatggttagtaccctaagatccgcgctgttagggttcgtagatggaggcgacctgttctgattgttaacttgtcagtacctgggaaatcctgggatggttctagctcgtccgcagatgagatcgatttcatgatcctctgtatcttgtttcgttgcctaggttccgtctaatctatccgtggtatgatgtagatgttttgatcgtgctaactacgtcttgtaaagttaattgtcaggtcataatttttagcatgcctttttttttgtttggttttgtctaattgggctgtcgttctagatcagagtagaagactgttccaaactacctgctggatttattgaacttggatctgtatgtgtgtcacatatcttcataaattcatgattaagatggattgaaatatcttttatctttttggtatggatagttctatatgttggtgtggctttgttagatgtatacatgcttagatacatgaagcaacgtgctgctactgtttagtaattgctgttcatttgtctaataaacagataaggatatgtatttatgttgctgttggttttgctggtactttgttggatacaaatgcttcaatacagaaaacagcatgctgctacgatttaccatttatctaatcttatcatatgtctaatctaataaacaaacatgcttttaaattatcttcatatgcttggatgatggcatacacagcggctatgtgtggttttttaaatacccagcatcatgggcatgcatgacactgctttaatatgctttttatttgcttgagactgtttcttttgtttatactgaccctttagttcggtgactcttctgcaggtcgactttaacttagcctaggatccatggcccagtccaagcacggcctgaccaaggagatgaccatgaagtaccgcatggagggctgcgtggacggccacaagttcgtgatcaccggcgagggcatcggctaccccttcaagggcaagcaggccatcaacctgtgcgtggtggagggcggccccttgcccttcgccgaggacatcttgtccgccgccttcatgtacggcaaccgcgtgttcaccgagtacccccaggacatcgtcgactacttcaagaactcctgccccgccggctacacctgggaccgctccttcctgttcgaggacggcgccgtgtgcatctgcaacgccgacatcaccgtgagcgtggaggagaactgcatgtaccacgagtccaagttctacggcgtgaacttccccgccgacggccccgtgatgaagaagatgaccgacaactgggagccctcctgcgagaagatcatccccgtgcccaagcagggcatcttgaagggcgacgtgagcatgtacctgctgctgaaggacggtggccgcttgcgctgccagttcgacaccgtgtacaaggccaagtccgtgccccgcaagatgcccgactggcacttcatccagcacaagctgacccgcgaggaccgcagcgacgccaagaaccagaagtggcacctgaccgagcacgccatcgcctccggctccgccttgccctccggactcagatctcgatagggtaccaatggccagttaacagatccagctgctgctgttctagggttcacaagtctgcctatttgtcttccccaatggagctatggttgtctggtctggtccttggtcgtgtcccgtttcattgtgtactatttacctgtaatgtgtatccttaagtctggtttgatggtgtctgaaacgttttgctgtggtagagcagcatggaagaactataatgaataagtgatccctaatcattgtgtccaaattttgcttctgctatacccttttgtgctgtttcttatgttttgcttaaaaatttgatctgacaaacaaatttgtctaaattatgctcttgttctgactgtgtactgtacacatttgtattgctaccggtttggcacatagttttctctttgattgcagatcaaacccttctgattgcagattgcttggctatggctgatgtgctcactgttcttctttagcttgtatattgctgatggtggcttggctacggctgaaaaagttgctgctgcgccgacttggcaactgttgctccagtaatgctttgtcctctcttcctagccgccgacttggcacttggcagctgttgctcctgtaatgcgttgttatctcttatctcttgagatgtactatgattttgaggctgtttgacttgtgccagattgccagtgctgatgctatattatctcaggtttttatgctagtatatgttttactgtgtgctgcctgtgtcgagttacgtaatctattgaaccgctatgcgtgttgatgccctgttgttgcttgccagattgatgcccctgttgcttgcagcttgcaagctgtagtgaaatcctaaaattcgaaaccaaatctattctgaacttttgaagatctgtgatgtccggaagaaaagattcaaacagataaacgggactctccagaatctataaaataaatgatcgacaaacgctttgctttggtaggcttcctagttagttagcggaccgaagcttcggtccgggcctgcggccgcagatatcagaacctgcgtctggacgcacaagtcatagcattatcggctaaaatttcttaatttctaaattagtcatatcggctaagaaagtggggagcactatcatttcgtagaacaagaacaaggtatcatatatatatatatatataatatttaaactttgttaagtggaatcaaagtgctagtattaatggagtttcatgtgcattaaattttatgtcacatcagcaattttgttgacttggcaaggtcatttagggtgtgtttggaagacaggggctattaggagtattaaacatagtctaattacaaaactaattgcacaaccgctaagctgaatcgcgagatggatctattaagcttaattagtccatgatttgacaatgtggtgctacaataaccatttgctaatgatggattacttaggtttaatagattcgtctcgtgatttagcctatgggttctgctattaattttgtaattagctcatatttagttcttataattagtatccgaacatccaatgtgacatgctaaagtttaaccctggtatccaaatgaagtcttatgagagtttcatcactccggtggtatatgtacttaggctccgttttcttccaccgacttatttttagcacccgtcacattgaatgtttagatactaattagaagtattaaacgtagactatttacaaaatccattacataagacgaatctaaacggcgagacgaatctattaaacctaattagtccatgatttgacaatgtgttgctacagtaaacatttgctaatgatggattaattaggcttaatagattcgtctcgccgtttagcctccacttatgtaatgggttttctaaacaatctacgtttaatactcctaattagtatctaaatattcaatgtgacacgtgctaaaaataagtcagtggaaggaagagaacgtccccttagttttccatcttattaattgtacgatgaaactgtgcagccagatgattgacaatcgcaatacttcaactagtgggccatgcacatcagcgacgtgtaacgtcgtgagttgctgttcccgtagagaaatatcaactggtgggccacgcacatcagcgtcgtgtaacgtggacggaggagccccgtgacggcgtcgacatcgaacggccaccaaccacggaaccacccgtccccacctctcggaagctccgctccacggcgtcgacatctaacggctaccagcaggcgtacgggttggagtggactccttgcctctttgcgctggcggcttccggaaattgcgtggcggagacgaggcgggctcgtctcacacggcacggaagacgtcacgggttccttccccacctctcctcttccccaccgccataaatagccgaccccctcgcctttctccccaatctcatctcgtctcgtgttgttcggagcacaccacccgccccaaatcgttcttcccgcaagcctcggcgatccttcacccgcttcaaggtacggcgatcgtcttcctcctctagatcggcgtgatctgcaagtagttgatttggtagatggttaggatctgtgcactgaagaaatcatgttagatccgcgatgtttctgttcgtagatggctgggaggtggaatttttgtgtagatctgatatgttctcctgtttatcttgtcacgctcctgcgatttgtggggattttaggtcgttgatctgggaatcgtggggttgcttctaggctgttcgtagatgaggtcgttctcacggtttactggatcattgcctagtagatcagctcgggctttcgtctttgtatatggtgcccatacttgcatctatgatctggttccgtggtgttacctaggtttctgcgcctgattcgtccgatcgattttgttagcatgtggtaaacgtttggtcatggtctgatttagattagagtcgaataggatgatctcgatctagctcttgggattaatatgcatgtgtcaccaatctgttccgtggttaagatgatgaatctatgcttagttaatgggtgtagatatatatgctgctgttcctcaatgatgccgtagcttttacctgagcagcatggatcgtcctgttacttaggtagatgcacatgcttatagatcaagatatgtactgctactgttggaattctttagtatacctgatgatcatccatgctcttgttacttgttttggtatacttggatgatggcatgctgctgctttttgttgatttgagcccatccatatctgcatatgtcacatgattaagatgattacgctgtttctgtatgatgccatagcttttatgtgagcaacatgcatcctcctggttatatgcattaatagatggaagatatctattgctacaatttgatgattattttgtacatacgatgatcaagcatgctcttcatactttgttgatatacttggataatgaaatgctgctgcacgttcattctatagcactaatgatgtgatgaacacgcacgacctgtttgtggcatctgtttgaatgtgttgttgctgttcactagagactgttttattaacctactgctagatacttacccttctgtctgtttattcttttgcagccagaatagcggatccgcccatggtcgaacaggacggcctgcatgcaggatcaccagcggcctgggtcgaaagactcttcggctacgactgggcacaacagaccatcgggtgtagcgacgcagctgttttcaggctgtccgcacagggcagacccgttttgttcgtcaaaacagacctgtctggcgcgctcaacgaactgcaagacgaggccgcaagactgagctggcttgctaccacaggcgttccttgtgctgcagtcctcgacgtcgttactgaggctggaagagactggctgctcctgggtgaagtcccaggacaggaccttttgtccagccatctggcacctgccgaaaaggtcagcatcatggcagacgccatgagaaggctgcacacactcgaccctgcaacatgccccttcgatcaccaggcaaaacacaggatcgagcgcgcaagaacgcgcatggaggctggtttggtcgaccaagatgacctcgacgaggaacaccaaggactggctcctgctgaactcttcgccagactcaaggcgagaatgccagacggtgacgacctggtcgtcacacacggcgacgcttgtctcccaaacataatggtcgagaacggacgcttcagcggtttcatcgactgcggtagactcggagtcgctgacagataccaggacatcgccctggcaacacgcgacatcgcagaggaactcggaggcgaatgggctgacaggtttctcgtgctctacggtatcgctgctccagacagccagaggatcgcattctacaggctcctcgacgagttcttttagttcgaacggtacccggggatcctctagtgccgtgggtcgtttaagctgccgctgtacctgtgtcgtctggtgccttctggtgtacctgggaggttgtcgtctatcaagtatctgtggttggtgtcatgagtcagtgagtcccaatactgttcgtgtcctgtgtgcattatacccaaaactgttatgggcaaatcatgaataagcttgatgttcgaacttaaaagtctctgctcaatatggtattatggttgtttttgttcgtctcctaatatttgcctgggatcaaattttattggctggtgttcatttgacctccatgttcttgctaggctccattttttactctacagccataatatgtttgattgtttggtttgttctttgttgtacacctggttctgtcgagcttagttttcgacactggcttacagcttaacatgttgctattttattgggttctgattgctattttattgggttctgattgctagtttttgctgaatccaaaaaccatgttatttatttaagcgatccaggttattattatgatggtggctaagtttttttttttccaagggtaaattttctggattctccagtgtttctgtggccgaattcaatcactagagtcgacctgcatgattccgatgacttcgtaggttcctagctcaagccgctcgtgtccaagcgtcacttacgattagctaatgattacggcatctaggaccgactagctagctagctaagagctcggtaccgagctcgaattcattccgattaatcgtggcctcttgctcttcaggatgaagagctatgtttaaacgtgcaagcgctactagacaattcagtacattaaaaacgtccgcaatgtgttattaagttgtctaagcgtcaatttgtttacaccacaatatatcctgcca

SEQ ID NO: 347 - DNA, 2597 bp, synthetic construct
  misc_feature 1..2597: note = 3xENH-UBI
  source 1..2597: mol_type = other DNA
atcgagcagctggcttgtggggaccagacaaaaaaggaatggtgcagaattgttaggcgcacctaccaaaagcatctttgcctttattgcaaagataaagcagattcctctagtacaagtggggaacaaaataacgtggaaaagagctgtcctgacagcccactcactaatgcgtatgacgaacgcagtgacgaccacaaaactcgagcaacgagatcatgagccaatcaaagaggagtgatgtagacctaaagcaataatggagccatgacgtaagggcttacgcccatacgaaataattaaaggctgatgtgacctgtcggtctctcagaacctttactttttatgtttggcgtgtatttttaaatttccacggcaatgacgatgtgaccgtcgacccactaaaacattgctttgtcaaaagctaaaaaagatgatgcccgacagccacttgtgtgaagcatgagaagccggtccctccactaagaaaattagtgaagcatcttccagtggtccctccactcacagctcaatcagtgagcaacaggacgaaggaaatgacgtaagccatgacgtctaatcccagggccagcttgcatgcctgcagtgcagcgtgacccggtcgtgcccctctctagagataatgagcattgcatgtctaagttataaaaaattaccacatattttttttgtcacacttgtttgaagtgcagtttatctatctttatacatatatttaaactttactctacgaataatataatctatagtactacaataatatcagtgttttagagaatcatataaatgaacagttagacatggtctaaaggacaattgagtattttgacaacaggactctacagttttatctttttagtgtgcatgtgttctcctttttttttgcaaatagcttcacctatataatacttcatccattttattagtacatccatttagggtttagggttaatggtttttatagactaatttttttagtacatctattttattctattttagcctctaaattaagaaaactaaaactctattttagtttttttatttaataatttagatataaaatagaataaaataaagtgactaaaaattaaacaaataccctttaagaaattaaaaaaactaaggaaacatttttcttgtttcgagtagataatgccagcctgttaaacgccgtcgacgagtctaacggacaccaaccagcgaaccagcagcgtcgcgtcgggccaagcgaagcagacggcacggcatctctgtcgctgcctctggacccctctcgagagttccgctccaccgttggacttgctccgctgtcggcatccagaaattgcgtggcggagcggcagacgtgagccggcacggcaggcggcctcctcctcctctcacggcaccggcagctacgggggattcctttcccaccgctccttcgctttcccttcctcgcccgccgtaataaatagacaccccctccacaccctctttccccaacctcgtgttgttcggagcgcacacacacacaaccagatctcccccaaatccacccgtcggcacctccgcttcaaggtacgccgctcgtcctcccccccccccctctctaccttctctagatcggcgttccggtccatgcatggttagggcccggtagttctacttctgttcatgtttgtgttagatccgtgtttgtgttagatccgtgctgctagcgttcgtacacggatgcgacctgtacgtcagacacgttctgattgctaacttgccagtgtttctctttggggaatcctgggatggctctagccgttccgcagacgggatcgatttcatgattttttttgtttcgttgcatagggtttggtttgcccttttcctttatttcaatatatgccgtgcacttgtttgtcgggtcatcttttcatgcttttttttgtcttggttgtgatgatgtggtctggttgggcggtcgttctagatcggagtagaattctgtttcaaactacctggtggatttattaattttggatctgtatgtgtgtgccatacatattcatagttacgaattgaagatgatggatggaaatatcgatctaggataggtatacatgttgatgcgggttttactgatgcatatacagagatgctttttgttcgcttggttgtgatgatgtggtgtggttgggcggtcgttcattcgttctagatcggagtagaatactgtttcaaactacctggtgtatttattaattttggaactgtatgtgtgtgtcatacatcttcatagttacgagtttaagatggatggaaatatcgatctaggataggtatacatgttgatgtgggttttactgatgcatatacatgatggcatatgcagcatctattcatatgctctaaccttgagtacctatctattataataaacaagtatgttttataattattttgatcttgatatacttggatgatggcatatgcagcagctatatgtggatttttttagccctgccttcatacgctatttatttgcttggtactgtttcttttgtcgatgctcaccctgttgtttggtgttacttctgcag

SEQ ID NO: 348 - DNA, 948 bp, synthetic construct
  misc_feature 1..948: note = MO-LEXA-MO-CBF1A
  source 1..948: mol_type = other DNA
atgaaagcgctcaccgcccgccaacaggaggtcttcgacctgatcagggatcacatctcccagacaggcatgccaccaacaagggcggaaatcgcacagaggctcgggtttcgctcgccaaacgctgccgaggagcaccttaaggcgctcgcgcgcaaaggcgttatcgagattgtgagcggagccagccgcggaatcaggctcttacaggaggaggaagagggacttccacttgtgggcagagtggccgctgacgaaccactccttgcccagcagcacatcgaaggacactaccaggtcgacccatccctgttcaagccaaacgccgatttcctcctccgcgtgtccgggatggcgatgaaagacatcggcatcatggacggcgacctgctggccgtccataaaactcaggacgtgcgcaacggccaggtggtggtggcccgcatcgacgatgaggtcacggtgaaacgcctcaagaagcagggcaataaagtggagctcctccccgaaaatagcgagttcaaaccaatcgtggtcgaccttcggcaacagtctttcacgattgagggcctggcggtgggcgttatcaggaacggcgattggcttggaggatccagctccccgccacccccgccaccgccaccgcccccgacctgcgccaaggacatccagaaagcagccgccgaagcggccctcgccttccaagacgagacgtgcgatacaaccaccacgaatcatggcctcgatatggaggaaacgatggtcgaagccatctacaccccagagcagtcagaaggcgccttctacatggacgaggaaaccatgttcggcatgccgaccctcctcgacaacatggccgaaggaatgctcctcccacctccctcagttcagtggaaccacaactacgacggcgaaggcgacggagacgtttccctgtggagctactag

SEQ ID NO: 349 - protein, 315 aa, synthetic construct
  REGION 1..315: note = MO-LEXA-MO-CBF1A_PROTEIN
MKALTARQQEVFDLIRDHISQTGMPPTRAEIAQRLGFRSPNAAEEHLKALARKGVIEIVSGASRGIRLLQEEEEGLPLVGRVAADEPLLAQQHIEGHYQVDPSLFKPNADFLLRVSGMAMKDIGIMDGDLLAVHKTQDVRNGQVVVARIDDEVTVKRLKKQGNKVELLPENSEFKPIVVDLRQQSFTIEGLAVGVIRNGDWLGGSSSPPPPPPPPPPTCAKDIQKAAAEAALAFQDETCDTTTTNHGLDMEETMVEAIYTPEQSEGAFYMDEETMFGMPTLLDNMAEGMLLPPPSVQWNHNYDGEGDGDVSLWSY

SEQ ID NO: 350 - DNA, 277 bp, synthetic construct
  misc_feature 1..277: note = 6xREC-MIN35S
  source 1..277: mol_type = other DNA
aattcgcccttgatactgtatatactcacagtatcatatgatactgtatatactcacagtatcatatgatactgtatatactcacagtataagggcgaattggcccttgatactgtatatactcacagtatcatatgatactgtatatactcacagtatcatatgatactgtatatactcacagtataagggcgaattgctgcagcccgggacaatcccactatccttcgcaagacccttcctctatataaggaagttcatttcatttggagaggac

SEQ ID NO: 351 - DNA, 32678 bp, synthetic construct
  source 1..32678: mol_type = other DNA
aaaccttttcacgcccttttaaatatccgattattctaataaacgctcttttctcttaggtttacccgccaatatatcctgtcaaacactgcggccgcacttgaccgcggatggagccggagctgtggtgaggccatcgacgggaggtgggggagaacacagtctcagtgttctttgtgagtccgcaaggtttttagcttttctgtattaattaaggttgctgttggctgtagaatacggtcgtggaagagctgtatcggtagctactacgtaagctattatatactggaagtctggagctcgtcgatctccggtcgtcttcctccatttctcctcgtcttgctttgactgctgctaccatttgcttctgttttctgatgaagcatgccatgtcggccaccagtgtttgtgtggtttttgcagggaatggctttcaagtgctgtgattgaatggccctcgtcgtcctcggctgagctcacatggacgcgtcatgtgagtgagatatatgatcatatgatgagtggggttcgggtgagtgcgtacttgaagtaggatcccgctttcactcattcattcattggcctttaaaccgggaaattttcgcgaggagatggagggaagcaagcagggtgacgagtgcagagtgccgcgagcgctttgtcaaaaggcaccgccgtaggcaaaaaaatcaatggccctgactgactcgatggtagtactactgtagagactagagagggttgctccccatatcttcgtgtgacttttactccagcattgcatttccgtcattgagacgttaattaatagcagctttcgggacagatgactgtggccatgtttcgtcacggccgcttcgtgccagctgggggtactatagtactgtgattttgttagtaaaaactttcattaggccaccattgacgaccgggccttcgcttttgctgcgctaattaaccatttcccggcgaccgaagggaacatgaacatgccccgacacatgagggcatgaggactagtgttctccctgtcgttcgttgacttgactagtgatagtttaaacgctcttcaactggaagagcggttactaccggttcactagctagctgctaatcgagctagttaccctatgaggtgacatgaagcgctcacggttactatgacggttagcttcacgactgttggtggcagtagcgtacgacttagctatagttccggacttacccttaagataacttcgtatagcatacattatacgaagttatgggcccacgcgtgaagagcggttaccagagctggtcacctttgtccaccaagatggaactgtcttcggccagaatggccatctggattcagcaggcctagaaggccatttatcgctatcaactttgtatagaaaagttgggccgaattcgagctcggtacggccagaatggcccggaccgaagcttgcggccgcacactgatagtttaaactgaaggcgggaaacgacaatctgatcatgagcggagaattaagggagtcacgttatgacccccgccgatgacgcgggacaagccgttttacgtttggaactgacagaaccgcaacgttgaaggagccactcagccgcgggtttctggagtttaatgagctaagcacatacgtcagaaaccattattgcgcgttcaaaagtcgcctaaggtcactatcagctagcaaatatttcttgtcaaaaatgctccactgacgttccataaattcccctcggtatccaattagagtctcatattcactctcccgggggatctcgactctagaggatcgctcaggaaggccgctgagatagaggcatggcggccaatgcgggcggcggtggagcgggaggaggcagcggcagcggcagcgtggctgcgccggcggtgtgccgccccagcggctcgcggtggacgccgacgccggagcagatcaggatgctgaaggagctctactacggctgcggcatccggtcgcccagctcggagcagatccagcgcatcaccgccatgctgcggcagcacggcaagatcgagggcaagaacgtcttctactggttccagaaccacaaggcccgcgagcgccagaagcgccgcctcaccagcctcgacgtcaacgtgcccgccgccggcgcggccgacgccaccaccagccaactcggcgtcctctcgctgtcgtcgccgccgccttcaggcgcggcgcctccctcgcccaccctcggcttctacgccgccggcaatggcggcggatcggctgtgctgctggacacgagttccgactggggcagcagcggcgctgccatggccaccgagacatgcttcctgcaggactacatgggcgtgacggacacgggcagctcgtcgcagtggccacgcttctcgtcgtcggacacgataatggcggcggccgcggcgcgggcggcgacgacgcgggcgcccgagacgctccctctcttcccgacctgcggcgacgacggcggcagcggtagcagcagctacttgccgttctggggtgccgcgtccacaactgccggcgccacttcttccgttgcgatccagcagcaacaccagctgcaggagcagtacagcttttacagcaacagcaacagcacccagctggccggcaccggcaaccaagacgtatcggcaacagcagcagcagccgccgccctggagctgagcctcagctcatggtgctccccttaccctgctgcagggagtatgtgagagcaacgcgagctgccactgctcttcactgatgtctctggaatggaaggaggaggaagtgagcatagcgttggtgcgttgctgtcaagggcgaattcacatggttaaccgacaaagcagcattagtccgttgatcggtggaagaccactcgtcagtgttgagttgaatgtttgatcaataaaatacggcaatgctgtaagggttgttttttatgccattgataatacactgtactgttcagttgttgaactctatttcttagccatgccaagtgcttttcttattttgaataacattacagcaaaaagttgaaagacaaaaaaaaaaacccccgaacagagtgctttgggtcccaagcttctttagactgtgttcggcgttccccctaaatttctccccctatatctcactcacttgtcacatcagcgttctctttccccctatatctccacgctctacagcagttccacctatatcaaacctctataccccaccacaacaatattatatactttcatcttcaactaactcatgtaccttccaatttttttctactaataattatttacgtgcacagaaacttagcaaggagagagagagcgggaatgcggccgccaccgcggtggagctcgaattccggtccgggcctagaaggccagcttcaagtttgtacaaaaaagcaggctccggccagaatctcactgactagctaaacagcggccgcatcgagcagctggcttgtggggaccagacaaaaaaggaatggtgcagaattgttaggcgcacctaccaaaagcatctttgcctttattgcaaagataaagcagattcctctagtacaagtggggaacaaaataacgtggaaaagagctgtcctgacagcccactcactaatgcgtatgacgaacgcagtgacgaccacaaaactcgagcaacgagatcatgagccaatcaaagaggagtgatgtagacctaaagcaataatggagccatgacgtaagggcttacgcccatacgaaataattaaaggctgatgtgacctgtcggtctctcagaacctttactttttatgtttggcgtgtatttttaaatttccacggcaatgacgatgtgaccgtcgacccactaaaacattgctttgtcaaaagctaaaaaagatgatgcccgacagccacttgtgtgaagcatgagaagccggtccctccactaagaaaattagtgaagcatcttccagtggtccctccactcacagctcaatcagtgagcaacaggacgaaggaaatgacgtaagccatgacgtctaatcccagggcccggtgaccaatcgaattagcttggcgcgtggaccgaagcttgcatgcctgcagtgcagcgtgacccggtcgtgcccctctctagagataatgagcattgcatgtctaagttataaaaaattaccacatattttttttgtcacacttgtttgaagtgcagtttatctatctttatacatatatttaaactttactctacgaataatataatctatagtactacaataatatcagtgttttagagaatcatataaatgaacagttagacatggtctaaaggacaattgagtattttgacaacaggactctacagttttatctttttagtgtgcatgtgttctcctttttttttgcaaatagcttcacctatataatacttcatccattttattagtacatccatttagggtttagggttaatggtttttatagactaatttttttagtacatctattttattctattttagcctctaaattaagaaaactaaaactctattttagtttttttatttaataatttagatataaaatagaataaaataaagtgactaaaaattaaacaaataccctttaagaaattaaaaaaactaaggaaacatttttcttgtttcgagtagataatgccagcctgttaaacgccgtcgacgagtctaacggacaccaaccagcgaaccagcagcgtcgcgtcgggccaagcgaagcagacggcacggcatctctgtcgctgcctctggacccctctcgagagttccgctccaccgttggacttgctccgctgtcggcatccagaaattgcgtggcggagcggcagacgtgagccggcacggcaggcggcctcctcctcctctcacggcaccggcagctacgggggattcctttcccaccgctccttcgctttcccttcctcgcccgccgtaataaatagacaccccctccacaccctctttccccaacctcgtgttgttcggagcgcacacacacacaaccagatctcccccaaatccacccgtcggcacctccgcttcaaggtacgccgctcgtcctcccccccccccctctctaccttctctagatcggcgttccggtccatgcatggttagggcccggtagttctacttctgttcatgtttgtgttagatccgtgtttgtgttagatccgtgctgctagcgttcgtacacggatgcgacctgtacgtcagacacgttctgattgctaacttgccagtgtttctctttggggaatcctgggatggctctagccgttccgcagacgggatcgatttcatgattttttttgtttcgttgcatagggtttggtttgcccttttcctttatttcaatatatgccgtgcacttgtttgtcgggtcatcttttcatgcttttttttgtcttggttgtgatgatgtggtctggttgggcggtcgttctagatcggagtagaattctgtttcaaactacctggtggatttattaattttggatctgtatgtgtgtgccatacatattcatagttacgaattgaagatgatggatggaaatatcgatctaggataggtatacatgttgatgcgggttttactgatgcatatacagagatgctttttgttcgcttggttgtgatgatgtggtgtggttgggcggtcgttcattcgttctagatcggagtagaatactgtttcaaactacctggtgtatttattaattttggaactgtatgtgtgtgtcatacatcttcatagttacgagtttaagatggatggaaatatcgatctaggataggtatacatgttgatgtgggttttactgatgcatatacatgatggcatatgcagcatctattcatatgctctaaccttgagtacctatctattataataaacaagtatgttttataattattttgatcttgatatacttggatgatggcatatgcagcagctatatgtggatttttttagcactgccttcatacgctatttatttgcttggtactgtttcttttgtcgatgctcaccctgttgtttggtgttacttctgcaggtcgactttaacttagcctaggatccatggccactgtgaacaactggctcgctttctccctctccccgcaggagctgccgccctcccagacgacggactccacactcatctcggccgccaccgccgaccatgtctccggcgatgtctgcttcaacatcccccaagattggagcatgaggggatcagagctttcggcgctcgtcgcggagccgaagctggaggacttcctcggcggcatctccttctccgagcagcatcacaaggccaactgcaacatgatacccagcactagcagcacagtttgctacgcgagctcaggtgctagcaccggctaccatcaccagctgtaccaccagcccaccagctcagcgctccacttcgcggactccgtaatggtggcttcctcggccggtgtccacgacggcggtgccatgctcagcgcggccgccgctaacggtgtcgctggcgctgccagtgccaacggcggcggcatcgggctgtccatgattaagaactggctgcggagccaaccggcgcccatgcagccgagggtggcggcggctgagggcgcgcaggggctctctttgtccatgaacatggcggggacgacccaaggcgctgctggcatgccacttctcgctggagagcgcgcacgggcgcccgagagtgtatcgacgtcagcacagggtggagccgtcgtcgtcacggcgccgaaggaggatagcggtggcagcggtgttgccggcgctctagtagccgtgagcacggacacgggtggcagcggcggcgcgtcggctgacaacacggcaaggaagacggtggacacgttcgggcagcgcacgtcgatttaccgtggcgtgacaaggcatagatggactgggagatatgaggcacatctttgggataacagttgcagaagggaagggcaaactcgtaagggtcgtcaagtctatttaggtggctatgataaagaggagaaagctgctagggcttatgatcttgctgctctgaagtactggggtgccacaacaacaacaaattttccagtgagtaactacgaaaaggagctcgaggacatgaagcacatgacaaggcaggagtttgtagcgtctctgagaaggaagagcagtggtttctccagaggtgcatccatttacaggggagtgactaggcatcaccaacatggaagatggcaagcacggattggacgagttgcagggaacaaggatctttacttgggcaccttcagcacccaggaggaggcagcggaggcgtacgacatcgcggcgatcaagttccgcggcctcaacgccgtcaccaacttcgacatgagccgctacgacgtgaagagcatcctggacagcagcgccctccccatcggcagcgccgccaagcgcctcaaggaggccgaggccgcagcgtccgcgcagcaccaccacgccggcgtggtgagctacgacgtcggccgcatcgcctcgcagctcggcgacggcggagccctggcggcggcgtacggcgcgcactaccacggcgccgcctggccgaccatcgcgttccagccgggcgccgccagcacaggcctgtaccacccgtacgcgcagcagccaatgcgcggcggcgggtggtgcaagcaggagcaggaccacgcggtgatcgcggccgcgcacagcctgcaggacctccaccacctgaacctgggcgcggccggcgcgcacgactttttctcggcagggcagcaggccgccgccgctgcgatgcacggcctgggtagcatcgacagtgcgtcgctcgagcacagcaccggctccaactccgtcgtctacaacggcggggtcggcgacagcaacggcgccagcgccgtcggcggcagtggcggtggctacatgatgccgatgagcgctgccggagcaaccactacatcggcaatggtgagccacgagcaggtgcatgcacgggcctacgacgaagccaagcaggctgctcagatggggtacgagagctacctggtgaacgcggagaacaatggtggcggaaggatgtctgcatgggggactgtcgtgtctgcagccgcggcggcagcagcaagcagcaacgacaacatggccgccgacgtcgggcatggcggcgcgcagctcttcagtgtctggaacgacacttaagcgtacctagtggtacctgacatcttatagtctgcaacctctcgtgtctgaattcctatctttatcaagtgttattgcttccacgactataggacagctttcgtcgaaagcttttgctcatgtgatctcgaaggattcatctagtctgatttttcgtgacttgtatcggttttattggattcatccaacatatatcaataaaaaatgagttgtgtttcctttcttcctagttcagttaaaattatttccctcctgcgcttgtgctgtaattgtctgtgtacctgttgtttgtgactgtgttagttcccttggatatgatttcgtatttgatatgtacatggagatagcttagcttcattattggagtatgaagttagtatgacatagtcactctcctggaaaattgacactgcaaaccatatttttattctgaaccacaaatcctagtcagtccgctggcatatgccgtccgtttgctgaatccagaacgtgggtttggagatgtacggctgagatgcctctatgcgaaggggatttcgtggtgaaacgagatgggagtagagcaacgcccgtggaagatgcttcaaacttccacacttttgagcaacgatcggcagtagtaaggtagacgatttcaagatcaaagcatatgaagataaacaacatcaacaacaaaatttgttggggttctatagagagaaacagagctacatacatacactgttttgtatctaccatctgagatgatgaaaagatgaaaaactaaagaatgccccggcgccaacgccaggacacgccgcgcgcgcgtcacccgagccatctcttgacccagccggcgctgtatatttacacacgttgcagcatcgatcaccacctgttcgatcgcgtcgccgtcaccggcgcgccgcgacttattgaactagtctagggcgcggctaacaacctagcttagattgccttgtctaaacccttaggctaacgcgccactctagaaggccgatctcccccgaacgcgccagatccgatatcgatgggccctggccgaagcttggtcacccggtccgggcctagaaggccgatctcccgggcacccagctttcttgtacaaagtggccgttaacggatcggccagaatggcccggaccgggttaccccgcggttcaaagccaatgactgttgttaggtccagtttctaaggacgaatcatccaatcactggttctttctgaacaaaacaaagagctatagagttacgttactgtagccgagacagagcctgcaatctggttatgccacatactaggttctttcttaaagttgactcactctatcctaagttctacttacaaggagctacaacaaattggtcataaccggagagcgttcaaggaggtaatatcccatcttactctgtagcaaggctacaaaaggagagctaaagaactaggctacaaaaagagagctaaagaactaactatctagcaagactacagagctatagtgtagagatttcataaccggtgagcgttcaaggatactttgaagagaagaggtaatatctcaactagcaagactacaaaaaaatggagatataaaactaactgtctaacaagactacagagctatagtagagatagatacgttcgacacttaagcatgagaattcgagctcggtaccctggttcacaaactcaatacaacacacagtggagtagggtattacgctccggcggcccgaaccactctaaatccttgtgtcctcgtgtgctcttccaccattaatgactgtaattgcagggacacgaagagttgtagcgcttttgccaacaagatccgctatatgctagtagagtggaacctgcacagcaacaagcatccaataatctgagaataagaattatgtgtggtgatggttctcatctctgcaactcgccattttcgcgagagaaccaaatccaagttggtgaagatcatgatttgggctcatgggctggcatagtagctattacctttgcaattgtggttcgaatctatccgatattctccttttcagggagagctaatgcttatgcttattgggtattttggtttgacactgcttcacgcccaaaaaaaggcaactatgtctgagttggatatggcccaaaaaaaggcagctatgtctgagttggatatggaagtcttctttcgtttagggtgaagtaagaccaagctcatgagcttattatcttaggtcggaacaaattagttgataggcatggcacatttatcaaattataatgattttaacagaaaagcaacacctctttttcagcagcaccagctttgcaagctgcaattgacactccaagcatagtatttgctccaaactcagcctgcatttcgcacaatatcatatctatttccatttggataaaatatattttccagaaatatgggaacagaatcaagatacagaaaaaagttgtggtagtagtggtaagtggaaacacaagtacagtgaaaagatagcattatttctgaacagtcaaattaaccgaaataagtagtatcacatactgcccctaaattgactacacccaatgtaaagaattgcttgagcatattgagccatcagttgtttgtttgtgtaacggatttgacaatgcagagttcaggagcaaaaaaccgcaaaggagagaaagagggaaaggatctcctagtatcccaccttgtggcgcgccctgtcaagtgcatgatggcctggtcgatctgcgtctgctgctgcggttccatcccaacgagtgcctccgacaccttgtcgttgatcacccgcaccgcgtaggcgacccccctggcgaggaacttccgcctctcggaggccccggccgcgtcggcggcggcgccctcgagcgcgcccacgctagccgtagatgctcggtgcacggccttgttggtgtgcaactcgacctcaacggccggtgcgctacgcccgtcaaggatctggcgcgcccgcaccctcgtgatcacggtgggcgcctcccgcctcatgtggccgacgatgaaaagcgccgggttaggggccttggcgcgcaccgccgtattcagggcctcctcgctcttgcgcgagagcaggtgcttccccaggtactcctgcactgacaaggctgccacagcggtggaatttgtcctcacgacttcgccacgtcgtcctcacctccctggcttcccacgactccgccgtatcgaggtgctcggtgggtcgtcttaatccgaagtccgaactaggaagacgagacagagaggtctgaggaatgggcctcgtttgatgttgagctgaattatttttccagcataagcccaggtcttggtccatgaacaaaattactagaaacccagcccagtactacgatctaaaagagggactgccactggatagctctctctagcattctccacgctccaatacagcggcgtcgtgtctatccgggtctatccgcgaacacgtgagaactctccagaaactgctttctcctccacttcatctctctcgctttccctctataaaaagaccccttctaggaattgagggagacagcaagcaccaagcagcgatccgaagctcaatcaattcactcaaacctcttccccaaatcttcgattagatcttcgttgacaagaagactagaaccgaacctgacatgtccaacctgctcacggttcaccagaaccttccggctcttccagtggacgcgacgtccgatgaagtcaggaagaacctcatggacatgttccgcgacaggcaagcgttcagcgagcacacctggaagatgctgctctccgtctgccgctcctgggctgcatggtgcaagctgaacaacaggaagtggttccccgctgagcccgaggacgtgagggattaccttctgtacctgcaagcgcgaggtttgtttctgcttctacctttgatatatatataataattatcattaattagtagtaatataatatttcaaatatttttttcaaaataaaagaatgtagtatatagcaattgcttttctgtagtttataagtgtgtatattttaatttataacttttctaatatatgaccaaaacatggtgatgcctaggtctggcagtgaagaccatccagcaacaccttggacaactgaacatgcttcacaggcgctccggcctcccgcgccccagcgactcgaacgccgtgagcctcgtcatgcgccgcatcaggaaggaaaacgtcgatgccggcgaaagggcaaagcaggccctcgcgttcgagaggaccgatttcgaccaggtccgcagcctgatggagaacagcgacaggtgccaggacattaggaacctggcgttcctcggaattgcatacaacacgctcctcaggatcgcggaaattgcccgcattcgcgtgaaggacattagccgcaccgacggcggcaggatgcttatccacattggcaggaccaagacgctcgtttccaccgcaggcgtcgaaaaggccctcagcctcggagtgaccaagctcgtcgaacgctggatctccgtgtccggcgtcgcggacgacccaaacaactacctcttctgccgcgtccgcaagaacggggtggctgcccctagcgccaccagccaactcagcacgagggccttggaaggtattttcgaggccacccaccgcctgatctacggcgcgaaggatgacagcggtcaacgctacctcgcatggtccgggcactccgcccgcgttggagctgctagggacatggcccgcgccggtgtttccatccccgaaatcatgcaggcgggtggatggacgaacgtgaacattgtcatgaactacattcgcaaccttgacagcgagacgggcgcaatggttcgcctcctggaagatggtgactgaggtacccaacctagacttgtccatcttctggattggccaacttaattaatgtatgaaataaaaggatgcacacatagtgacatgctaatcactataatgtgggcatcaaagttgtgtgttatgtgtaattactagttatctgaataaaagagaaagagatcatccatatttcttatcctaaatgaatgtcacgtgtctttataattctttgatgaaccagatgcatttcattaaccaaatccatatacatataaatattaatcatatataattaatatcaattgggttagcaaaacaaatctagtctaggtgtgttttgcgatccgatatcgaattggccacggtaccagctgctgctgttctagggttcacaagtctgcctatttgtcttccccaatggagctatggttgtctggtctggtccttggtcgtgtcccgtttcattgtgtactatttacctgtaatgtgtatccttaagtctggtttgatggtgtctgaaacgttttgctgtggtagagcagcatggaagaactataatgaataagtgatccctaatcattgtgtccaaattttgcttctgctatacccttttgtgctgtttcttatgttttgcttaaaaatttgatctgacaaacaaatttgtctaaattatgctcttgttctgactgtgtactgtacacatttgtattgctaccggtttggcacatagttttctctttgattgcagatcaaacccttctgattgcagattgcttggctatggctgatgtgctcactgttcttctttagcttgtatattgctgatggtggcttggctacggctgaaaaagttgctgctgcgccgacttggcaactgttgctccagtaatgctttgtcctctcttcctagccgccgacttggcacttggcagctgttgctcctgtaatgcgttgttatctcttatctcttgagatgtactatgattttgaggctgtttgacttgtgccagattgccagtgctgatgctatattatctcaggtttttatgctagtatatgttttactgtgtgctgcctgtgtcgagttacgtaatctattgaaccgctatgcgtgttgatgccctgttgttgcttgccagattgatgcccctgttgcttgcagcttgcaagctgtagtgaaatcctaaaattccaaaccaaatctattctgaacttttgaagatctgtgatgtccggaagaaaagattcaaacagataaacgggactctccagaatctataaaataaatgatcgacaaacgctttgctttggtaggcttcaagcttggtcacccggtccgggcctagaaggccagcttcggccgccccgggcaactttattatacaaagttgatagataaatcagatatctggttcctaaggacccggcggaccgattaaactgattcggtccgacgcgttacctaataacttcgtatagcatacattatacgaagttattagctaactaactagtaagcttaagccatgggtcgacggatccgttaactagcgtggcatttggcaccgccgcacactatgcgagctaggagtgctagtttacagatgaaactatgaaaccaagaaaacacaattgtccgtagctagcgcgtggcgtcgtgtcaagcttcacacagtatcttcgttcttcactataaatcgcgcctgttgttcgtgagacccaccaccgtggataacagtcccctaataataagcgatcaacagcactgctgatggctgaacaccgaggcgccgccgcgcgtaaccatccgccggagcagcccgtcgtgccggcgaacgacgccttccccgaccgcgcccagcagctctgcctcgacgccgggcgcgcgctcgcgatgtgcggcgtgctcgtcgccgtccctcccgcattttacgcgtcgacgtcgcggacgacaccgcacttgccttcgtcggcttcgtcctctggatcatcggtgcgtggctgtgcctcctggcgctcacgcccttggctccacgggcggtgagggcgggcggggccgccgccagcaccttgctgatcaggtgcctgtccctttcatgaactactagcgcccgcgcccgcggccgccgggcacaagagaacacatcgatgttcgctgcgtacgtcagcaataaggcactctttgtcagtagtcgagtgcatatgttgggtgtttgccctgggagatttcaagtgttgtggccattatcccgcaggataaaaaatcggcggcttttggattgatacggaaaataacgatgtttcatgctcgtgttgtgtgtgtgacatcttgtcagccaagtttttaaccgttgctactccccctctgtgggctcagtgtgtggaccggaatacgtcgtacataggccgtagcctaagcccaatatgccgtttttcaggttggcctgtgtgacgacaagcgggtctcaaaagcccatcacgcaactggcctgcaattattggaggagagcgcgtcgagttggttccagaggctgcgtggtggggccggactctgcgacgacctctcgttcgcgtccgatttggttgccgtgagccgtgacgtaacgcctccttccgttcctccctatataagttccacccccgggtccggtttccccaagccccagtgacccccgatcccgatcgcgaaatctccgcacccgccggcaagggaccgaagcaagcctctctcccgaccgtcgcatcaaggtacgcgtccgctcgatctgtcctcttccttctcgatttgacttgctgtggtgcccgatcacgggatcagaatcgcaccagtgtagatttcgcatgttctaagatgtgttagtttccaggctaatccagttctcttgacgcccgatccgatcgagctccgtgtttatttcagcctaatcgtagtattcccctaaaatttcctcattagggggttcgcaagattgttggtcgacaggttcacttatgctcgatcgcttacttttagtcgattcatgctgcgtactattgttgccccccgtggttttatcttttctcgtgtgaaatccagtagatatagtagatatcgtagcattaggttttaattcaatcgattgattattgtatcatcaaaattgagaagttcgaatcatgcctatcatgctgcctcaaccgaaatcctgtatattgaagtttcaattcaattgattgatcattcattagattcaaccaaaatctagaaggttagatgacgcatgtcatgctgcctgcgtagtttacctttgatctgtttatgattaccttatcagtaggatatttgtgattttgggaagtagcactaactgattcatgctgacatgatgttccctttcagattatactgttgagtcctatctaattgatgctttgtatgctatatgaatacgtcatggtaaattagcagttaattagcatattagcaattgggcgtacctcatcaggattgctcttgtagatgtgtgtggtgatgtttcttgttcaattcatgttctgctttaaaagtatgtgttctctgtttgttaattaagattcatggttataatgatttggacctaattaatcagggttgcccttttagatgcgtggttacttgttgagttcatttttttcctgctatagttgtatgcgtttgttcattcatggttagatttgatttgtttcttctctattccatgccttccatatacttcaattgtagcttaacatgagatttctgtatatgcaggtcgaccgccggggatccacacgacaccatggcccagtccaagcacggcctgaccaaggagatgaccatgaagtaccgcatggagggctgcgtggacggccacaagttcgtgatcaccggcgagggcatcggctaccccttcaagggcaagcaggccatcaacctgtgcgtggtggagggcggccccttgcccttcgccgaggacatcttgtccgccgccttcatgtacggcaaccgcgtgttcaccgagtacccccaggacatcgtcgactacttcaagaactcctgccccgccggctacacctgggaccgctccttcctgttcgaggacggcgccgtgtgcatctgcaacgccgacatcaccgtgagcgtggaggagaactgcatgtaccacgagtccaagttctacggcgtgaacttccccgccgacggccccgtgatgaagaagatgaccgacaactgggagccctcctgcgagaagatcatccccgtgcccaagcagggcatcttgaagggcgacgtgagcatgtacctgctgctgaaggacggtggccgcttgcgctgccagttcgacaccgtgtacaaggccaagtccgtgccccgcaagatgcccgactggcacttcatccagcacaagctgacccgcgaggaccgcagcgacgccaagaaccagaagtggcacctgaccgagcacgccatcgcctccggctccgccttgccctccggactcagatctcgatagggtaccaatggccagttaacagatccagctgctgctgttctagggttcacaagtctgcctatttgtcttccccaatggagctatggttgtctggtctggtccttggtcgtgtcccgtttcattgtgtactatttacctgtaatgtgtatccttaagtctggtttgatggtgtctgaaacgttttgctgtggtagagcagcatggaagaactataatgaataagtgatccctaatcattgtgtccaaattttgcttctgctatacccttttgtgctgtttcttatgttttgcttaaaaatttgatctgacaaacaaatttgtctaaattatgctcttgttctgactgtgtactgtacacatttgtattgctaccggtttggcacatagttttctctttgattgcagatcaaacccttctgattgcagattgcttggctatggctgatgtgctcactgttcttctttagcttgtatattgctgatggtggcttggctacggctgaaaaagttgctgctgcgccgacttggcaactgttgctccagtaatgctttgtcctctcttcctagccgccgacttggcacttggcagctgttgctcctgtaatgcgttgttatctcttatctcttgagatgtactatgattttgaggctgtttgacttgtgccagattgccagtgctgatgctatattatctcaggtttttatgctagtatatgttttactgtgtgctgcctgtgtcgagttacgtaatctattgaaccgctatgcgtgttgatgccctgttgttgcttgccagattgatgcccctgttgcttgcagcttgcaagctgtagtgaaatcctaaaattcgaaaccaaatctattctgaacttttgaagatctgtgatgtccggaagaaaagattcaaacagataaacgggactctccagaatctataaaataaatgatcgacaaacgctttgctttggtaggcttcctagttagttagcggaccgaagcttcggtccgggcctgcggccgcagatatcagaacctgcgtctggacgcacaagtcatagcattatcggctaaaatttcttaatttctaaattagtcatatcggctaagaaagtggggagcactatcatttcgtagaacaagaacaaggtatcatatatatatatatatataatatttaaactttgttaagtggaatcaaagtgctagtattaatggagtttcatgtgcattaaattttatgtcacatcagcaattttgttgacttggcaaggtcatttagggtgtgtttggaagacaggggctattaggagtattaaacatagtctaattacaaaactaattgcacaaccgctaagctgaatcgcgagatggatctattaagcttaattagtccatgatttgacaatgtggtgctacaataaccatttgctaatgatggattacttaggtttaatagattcgtctcgtgatttagcctatgggttctgctattaattttgtaattagctcatatttagttcttataattagtatccgaacatccaatgtgacatgctaaagtttaaccctggtatccaaatgaagtcttatgagagtttcatcactccggtggtatatgtacttaggctccgttttcttccaccgacttatttttagcacccgtcacattgaatgtttagatactaattagaagtattaaacgtagactatttacaaaatccattacataagacgaatctaaacggcgagacgaatctattaaacctaattagtccatgatttgacaatgtgttgctacagtaaacatttgctaatgatggattaattaggcttaatagattcgtctcgccgtttagcctccacttatgtaatgggttttctaaacaatctacgtttaatactcctaattagtatctaaatattcaatgtgacacgtgctaaaaataagtcagtggaaggaagagaacgtccccttagttttccatcttattaattgtacgatgaaactgtgcagccagatgattgacaatcgcaatacttcaactagtgggccatgcacatcagcgacgtgtaacgtcgtgagttgctgttcccgtagagaaatatcaactggtgggccacgcacatcagcgtcgtgtaacgtggacggaggagccccgtgacggcgtcgacatcgaacggccaccaaccacggaaccacccgtccccacctctcggaagctccgctccacggcgtcgacatctaacggctaccagcaggcgtacgggttggagtggactccttgcctctttgcgctggcggcttccggaaattgcgtggcggagacgaggcgggctcgtctcacacggcacggaagacgtcacgggttccttccccacctctcctcttccccaccgccataaatagccgaccccctcgcctttctccccaatctcatctcgtctcgtgttgttcggagcacaccacccgccccaaatcgttcttcccgcaagcctcggcgatccttcacccgcttcaaggtacggcgatcgtcttcctcctctagatcggcgtgatctgcaagtagttgatttggtagatggttaggatctgtgcactgaagaaatcatgttagatccgcgatgtttctgttcgtagatggctgggaggtggaatttttgtgtagatctgatatgttctcctgtttatcttgtcacgctcctgcgatttgtggggattttaggtcgttgatctgggaatcgtggggttgcttctaggctgttcgtagatgaggtcgttctcacggtttactggatcattgcctagtagatcagctcgggctttcgtctttgtatatggtgcccatacttgcatctatgatctggttccgtggtgttacctaggtttctgcgcctgattcgtccgatcgattttgttagcatgtggtaaacgtttggtcatggtctgatttagattagagtcgaataggatgatctcgatctagctcttgggattaatatgcatgtgtcaccaatctgttccgtggttaagatgatgaatctatgcttagttaatgggtgtagatatatatgctgctgttcctcaatgatgccgtagcttttacctgagcagcatggatcgtcctgttacttaggtagatgcacatgcttatagatcaagatatgtactgctactgttggaattctttagtatacctgatgatcatccatgctcttgttacttgttttggtatacttggatgatggcatgctgctgctttttgttgatttgagcccatccatatctgcatatgtcacatgattaagatgattacgctgtttctgtatgatgccatagcttttatgtgagcaacatgcatcctcctggttatatgcattaatagatggaagatatctattgctacaatttgatgattattttgtacatacgatgatcaagcatgctcttcatactttgttgatatacttggataatgaaatgctgctgcacgttcattctatagcactaatgatgtgatgaacacgcacgacctgtttgtggcatctgtttgaatgtgttgttgctgttcactagagactgttttattaacctactgctagatacttacccttctgtctgtttattcttttgcagccagaatagcggatccgcccatggtcgaacaggacggcctgcatgcaggatcaccagcggcctgggtcgaaagactcttcggctacgactgggcacaacagaccatcgggtgtagcgacgcagctgttttcaggctgtccgcacagggcagacccgttttgttcgtcaaaacagacctgtctggcgcgctcaacgaactgcaagacgaggccgcaagactgagctggcttgctaccacaggcgttccttgtgctgcagtcctcgacgtcgttactgaggctggaagagactggctgctcctgggtgaagtcccaggacaggaccttttgtccagccatctggcacctgccgaaaaggtcagcatcatggcagacgccatgagaaggctgcacacactcgaccctgcaacatgccccttcgatcaccaggcaaaacacaggatcgagcgcgcaagaacgcgcatggaggctggtttggtcgaccaagatgacctcgacgaggaacaccaaggactggctcctgctgaactcttcgccagactcaaggcgagaatgccagacggtgacgacctggtcgtcacacacggcgacgcttgtctcccaaacataatggtcgagaacggacgcttcagcggtttcatcgactgcggtagactcggagtcgctgacagataccaggacatcgccctggcaacacgcgacatcgcagaggaactcggaggcgaatgggctgacaggtttctcgtgctctacggtatcgctgctccagacagccagaggatcgcattctacaggctcctcgacgagttcttttagttcgaacggtacccggggatcctctagtgccgtgggtcgtttaagctgccgctgtacctgtgtcgtctggtgccttctggtgtacctgggaggttgtcgtctatcaagtatctgtggttggtgtcatgagtcagtgagtcccaatactgttcgtgtcctgtgtgcattatacccaaaactgttatgggcaaatcatgaataagcttgatgttcgaacttaaaagtctctgctcaatatggtattatggttgtttttgttcgtctcctaatatttgcctgggatcaaattttattggctggtgttcatttgacctccatgttcttgctaggctccattttttactctacagccataatatgtttgattgtttggtttgttctttgttgtacacctggttctgtcgagcttagttttcgacactggcttacagcttaacatgttgctattttattgggttctgattgctattttattgggttctgattgctagtttttgctgaatccaaaaaccatgttatttatttaagcgatccaggttattattatgatggtggctaagtttttttttttccaagggtaaattttctggattctccagtgtttctgtggccgaattcaatcactagagtcgacctgcatgattccgatgacttcgtaggttcctagctcaagccgctcgtgtccaagcgtcacttacgattagctaatgattacggcatctaggaccgactagtggcgcgccgactagctagctaaggtaccgagctcgaattcattccgattaatcgtggcctcttgctcttcaggatgaagagctatgtttaaacgtgcaagcgctactagacaattcagtacattaaaaacgtccgcaatgtgttattaagttgtctaagcgtcaatttgtttacaccacaatatatcctgccaccagccagccaacagctccccgaccggcagctcggcacaaaatcaccactcgatacaggcagcccatcagtccgggacggcgtcagcgggagagccgttgtaaggcggcagactttgctcatgttaccgatgctattcggaagaacggcaactaagctgccgggtttgaaacacggatgatctcgcggagggtagcatgttgattgtaacgatgacagagcgttgctgcctgtgatcaaatatcatctccctcgcagagatccgaattatcagccttcttattcatttctcgcttaaccgtgacaggctgtcgatcttgagaactatgccgacataataggaaatcgctggataaagccgctgaggaagctgagtggcgctatttctttagaagtgaacgttgacgatcgtcgggcccaggtagaatccgcctgagtcgcaagggtgacttcgcctatattggacgacggcgcgcagagggcgacctctttttgggttacgattgtaggattatcactaaaacaatacatgaacatattcaaatggcaatctctctaaggcattggaaataaatacaaataacagttgggtggagtttttcgacctgtgggcgttaaccttctgttaacctaaaagctcttgcccaaacagcagaatcggcgctaattgccagcggcggaacttttccagtttcgcgaaaaatatcgccactggcaaggaatgggtttgagatggcgaagtctgtcctaaaagcagcgcctgtagttgtagggttgacggccttgatggagcgtcatgccgatgccctctcgagccaacttcaagcacatcatcttaaggttttcccgccgcattccgagaagggcattcgaacattcgggccatcggaggcgtccaagctgctcggcgttggcgagtcatatttacggcagaccgcgtctgagatgccagagttgaatgttagcatgagcccgggtggcaggcgaatgttctcaattgaagatatccatgcgattcggaagtatatggatcaggtcggccgcgggaaccggcgctacctgccacatcgtcgaggcggcgagcagcttcaggttatctctgtgatgaatttcaaaggtgggtcgggtaagaccaccaccgccgcgcatctggcgcagtacctcgctatgcgcggatatcgagtcttggccattgatctcgatcctcaagcgagcctttctgcactctttgggagccaaccggagacggacgttggcccgaacgaaacgctctacggcgctataaggtatgatgatgagcaggtggcaatcgaacgagtcgtccgagggacttacattcccgacctccacctgattcctggtaatcttgagctgatggagtttgaacacgatacgccacgcgcgctgatgaaccgcaaagagggcgacacgctcttttatggtcgcatcagccaagtaattgaagatatcgcggataactatgacgtcgtggtcatcgactgccctccccagcttgggtatctcacgctatccgcattgactgcggcgacgtccattcttgtcacggtccatccgcagatgctggatgtgatgtcgatgaaccagtttctggcaatgacatcgaaccttttgcgtgaaatcgagaatgctggcgccaagttcaagtttaattggatgcgctatctgataacccgtttcgaaccgagcgacggaccacagaaccaaatggtaggttatctgcggtcgatttttggcgaaaatgtcctcaattttccgatgcttaaaaccaccgcggtttcggacgctggcctgacaaaccagactctattcgaagtggagcgtggcctgttcacgcgctcgacctatgatcgagccttggaggcgatgaacgccgtcaacgacgagatcgaaacactgatcaaaaaagcatggggtaggcccacatgagccggaagcacatccttggcgtctcaactgacgcccctgagacgtcgcccgccgacaataggacggcaaagaaccgctccatgccgctcctcggcgtaacaaggaaggagcgcgatccggcaacgaagctcacagcgaacattggtaacgcactgcgagagcaaaacgatcgtcttagccgtgccgaagagatcgagcggcgtctcgctgaaggtcaggcagtgatagagttggatgcctcgtcaatagaaccgtctttcgtgcaggatcgtatgcgaggggacattgacgggctccttacttcgatccgggaacaaggacagcaagtcccaatccttgtgcgaccgcatccgagccagccgggccgatatcaggttgccttcggccaccgccggctacgcgccgtttcagaactcggacttccggtcagagcggtcgttcgcgaactgacggacgagcaagtggtcgtagcacagggtcaggaaaacaatgagcgcgaagatcttaccttcatcgaaaaggcgcgcttcgcacatcgcctgaacaggcagttttctcgagagattgtcatcgccgcgatgtcgatcgacaagagcaatttgtccaagatgcttctgctcgttgacgccctcccctctgaactgaccgatgctattggtgccgctcctggtgttggacggccgagttggcaacaacttgccgagctgattgagaaagtttcttcaccggccgacgtggctaaatatgctatgtcggaggaagttcaagcgctgccatcggcagaacgattcaaggcggtgatcgctagtctgaagcccagtcgggttgcgcgtggacttcccgaggtcatggccaccccagacggcaccagaattgcacaggtgacgcagagcaaggccaaactggaaatcacgattgacaggaaggcgacgcccgattttgcgaccttcgtgctcgatcatgtgccagcgctgtatcaagcgtaccacgctgagaaccaacggaaacggggagagtaaaccgcaaaagaaaagagccccctcaacgtcgccgtcgcggaagcccttctgtctctctagcgcgaacagaatcgcatttcctcgaatcctcgtcaagagtttttagcgccgttttggtgagctgatttcctttgcctgctgaaaggtgaaagatgatgcagacaggaagtgtaacgacgccattcgggcggcggccaatgacgcttgcgcttgtgcggcgccagacggcgctggccgatatcaaacaaggcaagacagcggacaagtggaaggtctttagagacgcgtccgcggctatggaactacttggaatccagtccaacagtcttgccgtccttgatgcgctattgagctttcacccggaaacggagttgcgtcaggaggcacagctgatcgtcttcccgtcgaatgctcagcttgcccttcgggcgcatgggatggctggcgcgactttgcgtaggcacatcgccatgctcgtggagtcaggcttgatcgtccggaaggatagcgccaacggaaagcgttacgctcgtaaggatggcgctggtcagatcgagcgcgcgtttggcttcgatttgtctccgcttctcgcgcggtcggaagagctagcgatgatggcacagcaggtgatggccgatcgagcagcattcaggatggccaaagaaagtctgacgatttgccgacgggacgttcggaagctaattacggcagctatggaagagggagcggagggcgactggcaagctgtcgaggaagtctatgtggaacttgtgggtagaattccacgcgccccgacgcttgctgatgtagagtcaattctcgaagagatgtggatgctccaggaagagataatcaaccggttggaaattagagacaattcagaaaataatagcaccaatgctgcccagagcgagcagcacatacagaattcaaaacccgaatccgttaatgaacttgaacctcgctctgaaaaggagcagggcgctaagccgagtgaaatagaccgggcaaggagcgagccgataaaagcgttccccctcgggatgatcctgaaagcatgcccgaccattggcaactatgggccgagcggtgcggttgctagctggcgtgacctcatgtcggctgcggtggtggttcggtctatgctgggggtcagcccgtcggcttaccaagacgcgtgtgaggcaatgggaccggagaatgcggcagcagcgatggcgtgcattttggagcgagcgaacttcatcaattcgcccgggggctatctccgagatctgacacggcggagcgagcttgggaagttttcacttggcccgatgataatggcgctcttgaaggctagcgggcaggggacgttgcggtttggctagaattagcgagtatggagcaggatggtctgtggtcagctgaccacagacctaataggttgaaaacatgagcgttttttggatgatcgacagaccatccgattcccggagtaccaagcgtgctctgatgggagcgataacattactcaacaagcacgaaggccccatgccgatcgttgatcgtgaaggagagcctgctctacatgcggcggtattttgccggccgaggcatgtagtcgcggagcactgcctatttactgccgtgccacctgggtccttttcatcacgtgctataaaaataattataatttaaattttttaatataaatatataaattaaaaatagaaagtaaaaaaagaaattaaagaaaaaatagtttttgttttccgaagatgtaaaagactctagggggatcgccaacaaatactaccttttatcttgctcttcctgctctcaggtattaatgccgaattgtttcatcttgtctgtgtagaagaccacacacgaaaatcctgtgattttacattttacttatcgttaatcgaatgtatatctatttaatctgcttttcttgtctaataaatatatatgtaaagtacgctttttgttgaaattttttaaacctttgtttatttttttttcttcattccgtaactcttctaccttctttatttactttctaaaatccaaatacaaaacataaaaataaataaacacagagtaaattcccaaattattccatcattaaaagatacgaggcgcgtgtaagttacaggcaagcgatccgtcctaagaaaccattattatcatgacattaacctataaaaataggcgtatcacgaggccctttcgtctcgcgcgtttcggtgatgacggtgaaaacctctgacacatgcagctcccggagacggtcacagcttgtctgtaagcggatgccgggagcagacaagcccgtcagggcgcgtcagcgggtgttggcgggtgtcggggctggcttaactatgcggcatcagagcagattgtactgagagtgcaccataccacagcttttcaattcaattcatcattttttttttattcttttttttgatttcggtttctttgaaatttttttgattcggtaatctccgaacagaaggaagaacgaaggaaggagcacagacttagattggtatatatacgcatatgtagtgttgaagaaacatgaaattgcccagtattcttaacccaactgcacagaacaaaaacctgcaggaaacgaagataaatcatgtcgaaagctacatataaggaacgtgctgctactcatcctagtcctgttgctgccaagctatttaatatcatgcacgaaaagcaaacaaacttgtgtgcttcattggatgttcgtaccaccaaggaattactggagttagttgaagcattaggtcccaaaatttgtttactaaaaacacatgtggatatcttgactgatttttccatggagggcacagttaagccgctaaaggcattatccgccaagtacaattttttactcttcgaagacagaaaatttgctgacattggtaatacagtcaaattgcagtactctgcgggtgtatacagaatagcagaatgggcagacattacgaatgcacacggtgtggtgggcccaggtattgttagcggtttgaagcaggcggcagaagaagtaacaaaggaacctagaggccttttgatgttagcagaattgtcatgcaagggctccctatctactggagaatatactaagggtactgttgacattgcgaagagcgacaaagattttgttatcggctttattgctcaaagagacatgggtggaagagatgaaggttacgattggttgattatgacacccggtgtgggtttagatgacaagggagacgcattgggtcaacagtatagaaccgtggatgatgtggtctctacaggatctgacattattattgttggaagaggactatttgcaaagggaagggatgctaaggtagagggtgaacgttacagaaaagcaggctgggaagcatatttgagaagatgcggccagcaaaactaaaaaactgtattataagtaaactaggcacaaacgttgactcttggatcgagctggcagacaaagcaataacccacacagaggacgattaatggctgacgaagagatccagaatccgccggacggtactgctgctgccgaagttgagccggctgctcctagaggtagaagagcaaagaaagcaccagccgaaacagcccgcacgggatcgttcaaatccgtgaagccgaaaacccgcggcctcagcaaccgagaaaaactggagaagatcggtcaaatcgaagctcaggtcgctggcggcgcaaccttgaaggacgccgttaagatcgtgggtatttccgttcagacctattatcaatggaagagagctgcggttcaacctgtctcacagaatccggccgtgtctgtttcagttgacgatgaactcggcgagttcatccaactcgaggaggaaaatatgcatggcatgcccgttccatacagaagctgggcgaacaaacgatgctcgccttccagaaaaccgaggatgcgaaccacttcatccggggtcagcaccaccggcaagcgccgcgacggccgaggtcttccgatctcctgaagccagggcagatccgtgcacagcaccttgccgtagaagaacagcaaggccgccaatgcctgacgatgcgtggagaccgaaaccttgcgctcgttcgccagccaggacagaaatgcctcgacttcgctgctgcccaaggttgccgggtgacgcacaccgtggaaacggatgaaggcacgaacccagtggacataagcctgttcggttcgtaagctgtaatgcaagtagcgtatgcgctcacgcaactggtccagaaccttgaccgaacgcagcggtggtaacggcgcagtggcggttttcatggcttgttatgactgtttttttggggtacagtctatgcctcgggcatccaagcagcaagcgcgttacgccgtgggtcgatgtttgatgttatggagcagcaacgatgttacgcagcagggcagtcgccctaaaacaaagttaaacatcatgagggaagcggtgatcgccgaagtatcgactcaactatcagaggtagttggcgtcatcgagcgccatctcgaaccgacgttgctggccgtacatttgtacggctccgcagtggatggcggcctgaagccacacagtgatattgatttgctggttacggtgacggtaaggcttgatgaaacaacgcggcgagctttgatcaacgaccttttggaaacttcggcttcccctggagagagcgagattctccgcgctgtagaagtcaccattgttgtgcacgacgacatcattccgtggcgttatccagctaagcgcgaactgcaatttggagaatggcagcgcaatgacattcttgcaggtatcttcgagccagccacgatcgacattgatctggctatcttgctgacaaaagcaagagaacatagcgttgccttggtaggtccagcggcggaggaactctttgatccggttcctgaacaggatctatttgaggcgctaaatgaaaccttaacgctatggaactcgccgcccgactgggctggcgatgagcgaaatgtagtgcttacgttgtcccgcatttggtacagcgcagtaaccggcaaaatcgcgccgaaggatgtcgctgccgactgggcaatggagcgcctgccggcccagtatcagcccgtcatacttgaagctagacaggcttatcttggacaagaagaagatcgcttggcctcgcgcgcagatcagttggaagaatttgtccactacgtgaaaggcgagatcaccaaggtagtcggcaaataatgtctaacaattcgttcaagccgacgccgcttcgcggcgcggcttaactcaagcgttagatgcactatacgtaaccaactagtgcgctcttccgcttcctcgctcactgactcgctgcgctcggtcgttcggctgcggcgagcggtatcagctcactcaaaggcggtaatacggttatccacagaatcaggggataacgcaggaaagaacatgtgagcaaaaggccagcaaaaggccaggaaccgtaaaaaggccgcgttgctggcgtttttccataggctccgcccccctgacgagcatcacaaaaatcgacgctcaagtcagaggtggcgaaacccgacaggactataaagataccaggcgtttccccctggaagctccctcgtgcgctctcctgttccgaccctgccgcttaccggatacctgtccgcctttctcccttcgggaagcgtggcgctttctcatagctcacgctgtaggtatctcagttcggtgtaggtcgttcgctccaagctgggctgtgtgcacgaaccccccgttcagcccgaccgctgcgccttatccggtaactatcgtcttgagtccaacccggtaagacacgacttatcgccactggcagcagccactggtaacaggattagcagagcgaggtatgtaggcggtgctacagagttcttgaagtggtggcctaactacggctacactagaaggacagtatttggtatctgcgctctgctgaagccagttaccttcggaaaaagagttggtagctcttgatccggcaaacaaaccaccgctggtagcggtggtttttttgtttgcaagcagcagattacgcgcagaaaaaaaggatctcaagaagatcctttgatcttttctacggggtctgacgctcagtggaacgaaaactcacgttaagggattttggtcatgagattatcaaaaaggatcttcacctagatccttttaaattaaaaatgaagcgtaccgacgatcttgctgcgttcggatattttcgtggagttcccgccacagacccggattgaaggcgagatccagcaactcgcgccagatcatcctgtgacggaactttggcgcgtgatgactggccaggacgtcggccgaaagagcgacaagcagatcacgcttttcgacagcgtcggatttgcgatcgaggatttttcggcgctgcgctacgtccgcgaccgcgttgagggatcaagccacagcagcccactcgaccttctagccgacccagacgagccaagggatctttttggaatgctgctccgtcgtcaggctttccgacgtttgggtggttgaacagaagtcattatcgcacggaatgccaagcactcccgaggggaaccctgtggttggcatgcacatacaaatggacgaacggat

SEQ ID NO: 352 - DNA, 34051 bp, synthetic construct
  source 1..34051: mol_type = other DNA
aaaccttttcacgcccttttaaatatccgattattctaataaacgctcttttctcttaggtttacccgccaatatatcctgtcaaacactgcggccgcacttgaccgcggatggagccggagctgtggtgaggccatcgacgggaggtgggggagaacacagtctcagtgttctttgtgagtccgcaaggtttttagcttttctgtattaattaaggttgctgttggctgtagaatacggtcgtggaagagctgtatcggtagctactacgtaagctattatatactggaagtctggagctcgtcgatctccggtcgtcttcctccatttctcctcgtcttgctttgactgctgctaccatttgcttctgttttctgatgaagcatgccatgtcggccaccagtgtttgtgtggtttttgcagggaatggctttcaagtgctgtgattgaatggccctcgtcgtcctcggctgagctcacatggacgcgtcatgtgagtgagatatatgatcatatgatgagtggggttcgggtgagtgcgtacttgaagtaggatcccgctttcactcattcattcattggcctttaaaccgggaaattttcgcgaggagatggagggaagcaagcagggtgacgagtgcagagtgccgcgagcgctttgtcaaaaggcaccgccgtaggcaaaaaaatcaatggccctgactgactcgatggtagtactactgtagagactagagagggttgctccccatatcttcgtgtgacttttactccagcattgcatttccgtcattgagacgttaattaatagcagctttcgggacagatgactgtggccatgtttcgtcacggccgcttcgtgccagctgggggtactatagtactgtgattttgttagtaaaaactttcattaggccaccattgacgaccgggccttcgcttttgctgcgctaattaaccatttcccggcgaccgaagggaacatgaacatgccccgacacatgagggcatgaggactagtgttctccctgtcgttcgttgacttgactagtgatagtttaaacgctcttcaactggaagagcggttactaccggttcactagctagctgctaatcgagctagttaccctatgaggtgacatgaagcgctcacggttactatgacggttagcttcacgactgttggtggcagtagcgtacgacttagctatagttccggacttacccttaagataacttcgtatagcatacattatacgaagttatgggcccacgcgtgaagagcggttaccagagctggtcacctttgtccaccaagatggaactgtcttcggccagaatggccatctggattcagcaggcctagaaggccatttatcgctatcaactttgtatagaaaagttgggccgaattcgagctcggtacggccagaatggcccggaccgaagcttgcatgcctgcagcccatccctcagccgcctttcactatcttttttgcccgagtcattgtcatgtgaaccttggcatgtataatcggtgaattgcgtcgattttcctcttataggtgggccaatgaatccgtgtgatcgcgtctgattggctagagatatgtttcttccttgttggatgtattttcatacataatcatatgcatacaaatatttcattacactttatagaaatggtcagtaataaaccctatcactatgtctggtgtttcattttatttgcttttaaacgaaaattgacttcctgattcaatatttaaggatcgtcaacggtgtgcagttactaaattctggtttgtaggaactatagtaaactattcaagtcttcacttattgtgcactcacctctcgccacatcaccacagatgttattcacgtcttaaatttgaactacacatcatattgacacaatattttttttaaataagcgattaaaacctagcctctatgtcaacaatggtgtacataaccagcgaagtttagggagtaaaaaacatcgccttacacaaagttcgctttaaaaaataaagagtaaattttactttggaccacccttcaaccaatgtttcactttagaacgagtaattttattattgtcactttggaccaccctcaaatcttttttccatctacatccaatttatcatgtcaaagaaatggtctacatacagctaaggagatttatcgacgaatagtagctagcatactcgaggtcattcatatgcttgagaagagagtcgggatagtccaaaataaaacaaaggtaagattacctggtcaaaagtgaaaacatcagttaaaaggtggtataaagtaaaatatcggtaataaaaggtggcccaaagtgaaatttactcttttctactattataaaaattgaggatgtttttgtcggtactttgatacgtcatttttgtatgaattggtttttaagtttattcgcttttggaaatgcatatctgtatttgagtcgggttttaagttcgtttgcttttgtaaatacagagggatttgtataagaaatatctttaaaaaaacccatatgctaatttgacataatttttgagaaaaatatatattcaggcgaattctcacaatgaacaataataagattaaaatagctttcccccgttgcagcgcatgggtattttttctagtaaaaataaaagataaacttagactcaaaacatttacaaaaacaacccctaaagttcctaaagcccaaagtgctatccacgatccatagcaagcccagcccaacccaacccaacccaacccaccccagtccagccaactggacaatagtctccacacccccccactatcaccgtgagttgtccgcacgcaccgcacgtctcgcagccaaaaaaaaaaaaagaaagaaaaaaaagaaaaagaaaaaacagcaggtgggtccgggtcgtgggggccggaaacgcgaggaggatcgcgagccagcgacgaggccggccctccctccgcttccaaagaaacgccccccatcgccactatatacatacccccccctctcctcccatccccccaaccctaccaccaccaccaccaccacctccacctcctcccccctcgctgccggacgacgagctcctcccccctccccctccgccgccgccgcgccggtaaccaccccgcccctctcctctttctttctccgttttttttttccgtcacggtctcgatctttggccttggtagtttgggtgggcgagaggcggcttcgtgcgcgcccagatcggtgcgcgggaggggcgggatctcgcggctggggctctcgccggcgtggatcaggcccggatctcgcggggaatggggctctcggatgtagatctgcgatccgccgttgttgggggagatgatggggggtttaaaatttccgccatgctaaacaagatcaggaagaggggaaaagggcactatggtttatatttttatatatttctgctgcttcgtcaggcttagatgtgctagatctttctttcttctttttgtgggtagaatttgaatccctcagcattgttcatcggtagtttttcttttcatgatttgtgacaaatgcagcctcgtgcggagcttttttgtaggtagaaggatccgcccatggcggccaatgcgggcggcggtggagcgggaggaggcagcggcagcggcagcgtggctgcgccggcggtgtgccgccccagcggctcgcggtggacgccgacgccggagcagatcaggatgctgaaggagctctactacggctgcggcatccggtcgcccagctcggagcagatccagcgcatcaccgccatgctgcggcagcacggcaagatcgagggcaagaacgtcttctactggttccagaaccacaaggcccgcgagcgccagaagcgccgcctcaccagcctcgacgtcaacgtgcccgccgccggcgcggccgacgccaccaccagccaactcggcgtcctctcgctgtcgtcgccgccgccttcaggcgcggcgcctccctcgcccaccctcggcttctacgccgccggcaatggcggcggatcggctgtgctgctggacacgagttccgactggggcagcagcggcgctgctatggccaccgagacatgcttcctgcaggactacatgggcgtgacggacacgggcagctcgtcgcagtggccacgcttctcgtcgtcggacacgataatggcggcggccgcggcgcgggcggcgacgacgcgggcgcccgagacgctccctctcttcccgacctgcggcgacgacggcggcagcggtagcagcagctacttgccgttctggggtgccgcgtccacaactgccggcgccacttcttccgttgcgatccaacagcaacaccagctgcaggagcagtacagcttttacagcaacagcaacagcacccagctggccggcaccggcaaccaagacgtatcggcaacagcagcagcagccgccgccctggagctgagcctcagctcatggtgctccccttaccctgctgcagggagtatgtgagagcaacgcgagctgccactgctcttcactgatgtctctggaatggaaggaggaggaagtgagaacagatcattcgacaaagcagcattagtccgttgatcggtggaagaccactcgtcagtgttgagttgaatgtttgatcaataaaatacggcaatgctgtaagggttgttttttatgccattgataatacactgtactgttcagttgttgaactctatttcttagccatgccaagtgcttttcttattttgaataacattacagcaaaaagttgaaagacaaaaaaaaaaacccccgaacagagtgctttgggtcccaagcttctttagactgtgttcggcgttccccctaaatttctccccctatatctcactcacttgtcacatcagcgttctctttccccctatatctccacgctctacagcagttccacctatatcaaacctctataccccaccacaacaatattatatactttcatcttcaactaactcatgtaccttccaatttttttctactaataattatttacgtgcacagaaacttagcaaggagagagagagcgggaatttaaatgctcggcgttaggcttttagtccgctaggtggctagaccgaggttaggacgctagttcactaggggcctagtggtgttttaagacgtcacggtcacctgaagaaactatgtgctgtagtatagccgctgcccgctggctagctagctagttgagtcatttagcggcgatgattgagtaataatgtgtcacgcatcaccatgcatgggtggcagtgtcagtgtgagcaatgacctgaatgaacaattgaaatgaaaagaaaaaagtattgttccaaattaaacgttttaaccttttaataggtttatacaataattgatatatgttttctgtatatgtctaatttgttatcatccatttagatatagacaaaaaaaatctaagaactaaaacaaatgctaatttgaaatgaagggagtatatattgggataatgtcgatgagatccctcgtaatatcaccgacatcacacgtgtccagttaatgtatcagtgatacgtgtattcacatttgttgcgcgtaggcgtacccaacaattttgatcgactatcagaaagtcaacggaagcgagtcgacctcgagggggggccccggccgaagcttcggccggggcccatcgataacgagtatcggtccccattgacacatctactcctaacgctaacaacattcttcacttctagtgtatggcatcgacaattggtactttaatcttgggtcttcacttttacaactaaacaacccaaatataaatattatttgagtgggtttggtgttcatcagaacattcccatctttggtaatgctacctagcataaaagtgagctatcacgttgggcagcccattccatgcaatttttaccttcctcaaaaaaaatctttgatatatttatggtataataatttaaacttcacattgatcataattttttcagcaaataagttccataatttggtgtttgcaatatcgaaattgttactcatagggtccagttgatttaatgacattagtgttgttaagttcacatgcttcaaagaattctacatgtctacaatgctgcatttgtctgtaaaatttgggttcttgtaaaaaatacatgtgttgaatatttaccaaaaaaatataatgcgatatgactttgtgtgagcatgtttggacacagttacaagtttacttctaaacttatattatgttttgcttcgtgcaagtacaagtgatttgaatatccaaggccaaagcatgtgtccatcactatatcaaatcaacataccatatatgtatatactcaacaaaaagcacaaataatcacatctatgttataaacacacccccacacaaccaaacattaacattcaataggttgtgctaggacatcattgggatgatgaagtaatattgtattatctatgtattgaccaagcatgagtttaaaattacgatttgatgttttcagttatttatatgatgaacatagttcagaaatatatcgagataaatctcaatcaatatattgattatttctaggaaacacatgccggtatgagggcaccattgtcgagtacatcttaagtgagttaacggatcctctagagtcgacctgcaggcatgcccgcggatatcgatgggccccggccgaagcttcaagtttgtacaaaaaagcaggctccggccagaatctcactgactagctaaacagcggccgcatcgagcagctggcttgtggggaccagacaaaaaaggaatggtgcagaattgttaggcgcacctaccaaaagcatctttgcctttattgcaaagataaagcagattcctctagtacaagtggggaacaaaataacgtggaaaagagctgtcctgacagcccactcactaatgcgtatgacgaacgcagtgacgaccacaaaactcgagcaacgagatcatgagccaatcaaagaggagtgatgtagacctaaagcaataatggagccatgacgtaagggcttacgcccatacgaaataattaaaggctgatgtgacctgtcggtctctcagaacctttactttttatgtttggcgtgtatttttaaatttccacggcaatgacgatgtgaccgtcgacccactaaaacattgctttgtcaaaagctaaaaaagatgatgcccgacagccacttgtgtgaagcatgagaagccggtccctccactaagaaaattagtgaagcatcttccagtggtccctccactcacagctcaatcagtgagcaacaggacgaaggaaatgacgtaagccatgacgtctaatcccagggcccggtgaccaatcgaattagcttggcgcgtggaccgaagcttgcatgcctgcagtgcagcgtgacccggtcgtgcccctctctagagataatgagcattgcatgtctaagttataaaaaattaccacatattttttttgtcacacttgtttgaagtgcagtttatctatctttatacatatatttaaactttactctacgaataatataatctatagtactacaataatatcagtgttttagagaatcatataaatgaacagttagacatggtctaaaggacaattgagtattttgacaacaggactctacagttttatctttttagtgtgcatgtgttctcctttttttttgcaaatagcttcacctatataatacttcatccattttattagtacatccatttagggtttagggttaatggtttttatagactaatttttttagtacatctattttattctattttagcctctaaattaagaaaactaaaactctattttagtttttttatttaataatttagatataaaatagaataaaataaagtgactaaaaattaaacaaataccctttaagaaattaaaaaaactaaggaaacatttttcttgtttcgagtagataatgccagcctgttaaacgccgtcgacgagtctaacggacaccaaccagcgaaccagcagcgtcgcgtcgggccaagcgaagcagacggcacggcatctctgtcgctgcctctggacccctctcgagagttccgctccaccgttggacttgctccgctgtcggcatccagaaattgcgtggcggagcggcagacgtgagccggcacggcaggcggcctcctcctcctctcacggcaccggcagctacgggggattcctttcccaccgctccttcgctttcccttcctcgcccgccgtaataaatagacaccccctccacaccctctttccccaacctcgtgttgttcggagcgcacacacacacaaccagatctcccccaaatccacccgtcggcacctccgcttcaaggtacgccgctcgtcctcccccccccccctctctaccttctctagatcggcgttccggtccatgcatggttagggcccggtagttctacttctgttcatgtttgtgttagatccgtgtttgtgttagatccgtgctgctagcgttcgtacacggatgcgacctgtacgtcagacacgttctgattgctaacttgccagtgtttctctttggggaatcctgggatggctctagccgttccgcagacgggatcgatttcatgattttttttgtttcgttgcatagggtttggtttgcccttttcctttatttcaatatatgccgtgcacttgtttgtcgggtcatcttttcatgcttttttttgtcttggttgtgatgatgtggtctggttgggcggtcgttctagatcggagtagaattctgtttcaaactacctggtggatttattaattttggatctgtatgtgtgtgccatacatattcatagttacgaattgaagatgatggatggaaatatcgatctaggataggtatacatgttgatgcgggttttactgatgcatatacagagatgctttttgttcgcttggttgtgatgatgtggtgtggttgggcggtcgttcattcgttctagatcggagtagaatactgtttcaaactacctggtgtatttattaattttggaactgtatgtgtgtgtcatacatcttcatagttacgagtttaagatggatggaaatatcgatctaggataggtatacatgttgatgtgggttttactgatgcatatacatgatggcatatgcagcatctattcatatgctctaaccttgagtacctatctattataataaacaagtatgttttataattattttgatcttgatatacttggatgatggcatatgcagcagctatatgtggatttttttagcactgccttcatacgctatttatttgcttggtactgtttcttttgtcgatgctcaccctgttgtttggtgttacttctgcaggtcgactttaacttagcctaggatccatggccactgtgaacaactggctcgctttctccctctccccgcaggagctgccgccctcccagacgacggactccacactcatctcggccgccaccgccgaccatgtctccggcgatgtctgcttcaacatcccccaagattggagcatgaggggatcagagctttcggcgctcgtcgcggagccgaagctggaggacttcctcggcggcatctccttctccgagcagcatcacaaggccaactgcaacatgatacccagcactagcagcacagtttgctacgcgagctcaggtgctagcaccggctaccatcaccagctgtaccaccagcccaccagctcagcgctccacttcgcggactccgtaatggtggcttcctcggccggtgtccacgacggcggtgccatgctcagcgcggccgccgctaacggtgtcgctggcgctgccagtgccaacggcggcggcatcgggctgtccatgattaagaactggctgcggagccaaccggcgcccatgcagccgagggtggcggcggctgagggcgcgcaggggctctctttgtccatgaacatggcggggacgacccaaggcgctgctggcatgccacttctcgctggagagcgcgcacgggcgcccgagagtgtatcgacgtcagcacagggtggagccgtcgtcgtcacggcgccgaaggaggatagcggtggcagcggtgttgccggcgctctagtagccgtgagcacggacacgggtggcagcggcggcgcgtcggctgacaacacggcaaggaagacggtggacacgttcgggcagcgcacgtcgatttaccgtggcgtgacaaggcatagatggactgggagatatgaggcacatctttgggataacagttgcagaagggaagggcaaactcgtaagggtcgtcaagtctatttaggtggctatgataaagaggagaaagctgctagggcttatgatcttgctgctctgaagtactggggtgccacaacaacaacaaattttccagtgagtaactacgaaaaggagctcgaggacatgaagcacatgacaaggcaggagtttgtagcgtctctgagaaggaagagcagtggtttctccagaggtgcatccatttacaggggagtgactaggcatcaccaacatggaagatggcaagcacggattggacgagttgcagggaacaaggatctttacttgggcaccttcagcacccaggaggaggcagcggaggcgtacgacatcgcggcgatcaagttccgcggcctcaacgccgtcaccaacttcgacatgagccgctacgacgtgaagagcatcctggacagcagcgccctccccatcggcagcgccgccaagcgcctcaaggaggccgaggccgcagcgtccgcgcagcaccaccacgccggcgtggtgagctacgacgtcggccgcatcgcctcgcagctcggcgacggcggagccctggcggcggcgtacggcgcgcactaccacggcgccgcctggccgaccatcgcgttccagccgggcgccgccagcacaggcctgtaccacccgtacgcgcagcagccaatgcgcggcggcgggtggtgcaagcaggagcaggaccacgcggtgatcgcggccgcgcacagcctgcaggacctccaccacctgaacctgggcgcggccggcgcgcacgactttttctcggcagggcagcaggccgccgccgctgcgatgcacggcctgggtagcatcgacagtgcgtcgctcgagcacagcaccggctccaactccgtcgtctacaacggcggggtcggcgacagcaacggcgccagcgccgtcggcggcagtggcggtggctacatgatgccgatgagcgctgccggagcaaccactacatcggcaatggtgagccacgagcaggtgcatgcacgggcctacgacgaagccaagcaggctgctcagatggggtacgagagctacctggtgaacgcggagaacaatggtggcggaaggatgtctgcatgggggactgtcgtgtctgcagccgcggcggcagcagcaagcagcaacgacaacatggccgccgacgtcgggcatggcggcgcgcagctcttcagtgtctggaacgacacttaagcgtacctagtggtacctgacatcttatagtctgcaacctctcgtgtctgaattcctatctttatcaagtgttattgcttccacgactataggacagctttcgtcgaaagcttttgctcatgtgatctcgaaggattcatctagtctgatttttcgtgacttgtatcggttttattggattcatccaacatatatcaataaaaaatgagttgtgtttcctttcttcctagttcagttaaaattatttccctcctgcgcttgtgctgtaattgtctgtgtacctgttgtttgtgactgtgttagttcccttggatatgatttcgtatttgatatgtacatggagatagcttagcttcattattggagtatgaagttagtatgacatagtcactctcctggaaaattgacactgcaaaccatatttttattctgaaccacaaatcctagtcagtccgctggcatatgccgtccgtttgctgaatccagaacgtgggtttggagatgtacggctgagatgcctctatgcgaaggggatttcgtggtgaaacgagatgggagtagagcaacgcccgtggaagatgcttcaaacttccacacttttgagcaacgatcggcagtagtaaggtagacgatttcaagatcaaagcatatgaagataaacaacatcaacaacaaaatttgttggggttctatagagagaaacagagctacatacatacactgttttgtatctaccatctgagatgatgaaaagatgaaaaactaaagaatgccccggcgccaacgccaggacacgccgcgcgcgcgtcacccgagccatctcttgacccagccggcgctgtatatttacacacgttgcagcatcgatcaccacctgttcgatcgcgtcgccgtcaccggcgcgccgcgacttattgaactagtctagggcgcggctaacaacctagcttagattgccttgtctaaacccttaggctaacgcgccactctagaaggccgatctcccccgaacgcgccagatccgatatcgatgggccctggccgaagcttggtcacccggtccgggcctagaaggccgatctcccgggcacccagctttcttgtacaaagtggccgttaacggatcggccagaatggcccggaccgggttaccccgcggttcaaagccaatgactgttgttaggtccagtttctaaggacgaatcatccaatcactggttctttctgaacaaaacaaagagctatagagttacgttactgtagccgagacagagcctgcaatctggttatgccacatactaggttctttcttaaagttgactcactctatcctaagttctacttacaaggagctacaacaaattggtcataaccggagagcgttcaaggaggtaatatcccatcttactctgtagcaaggctacaaaaggagagctaaagaactaggctacaaaaagagagctaaagaactaactatctagcaagactacagagctatagtgtagagatttcataaccggtgagcgttcaaggatactttgaagagaagaggtaatatctcaactagcaagactacaaaaaaatggagatataaaactaactgtctaacaagactacagagctatagtagagatagatacgttcgacacttaagcatgagaattcctatagtattttaaaattgcattaacaaacatgtcctaattggtactcctgagatactataccctcctgttttaaaatagttggcattatcgaattatcattttactttttaatgttttctcttcttttaatatattttatgaattttaatgtattttaaaatgttatgcagttcgctctggacttttctgctgcgcctacacttgggtgtactgggcctaaattcagcctgaccgaccgcctgcattgaataatggatgagcaccggtaaaatccgcgtacccaactttcgagaagaaccgagacgtggcgggccgggccaccgacgcacggcaccagcgactgcacacgtcccgccggcgtacgtgtacgtgctgttccctcactggccgcccaatccactcatgcatgcccacgtacacccctgccgtggcgcgcccagatcctaatcctttcgccgttctgcacttctgctgcctataaatggcggcatcgaccgtcacctgcttcaccaccggcgagccacatcgagaacacgatcgagcacacaagcacgaagactcgtttaggagaaaccacaaaccaccaagccgtgcaagcaccaggcttgggcacccgctccgggcttagaaggccagcttcaagtttgtacaaaaaagcaggctatgtccaacctgctcacggttcaccagaaccttccggctcttccagtggacgcgacgtccgatgaagtcaggaagaacctcatggacatgttccgcgacaggcaagcgttcagcgagcacacctggaagatgctgctctccgtctgccgctcctgggctgcatggtgcaagctgaacaacaggaagtggttccccgctgagcccgaggacgtgagggattaccttctgtacctgcaagcgcgaggtttgtttctgcttctacctttgatatatatataataattatcattaattagtagtaatataatatttcaaatatttttttcaaaataaaagaatgtagtatatagcaattgcttttctgtagtttataagtgtgtatattttaatttataacttttctaatatatgaccaaaacatggtgatgcctaggtctggcagtgaagaccatccagcaacaccttggacaactgaacatgcttcacaggcgctccggcctcccgcgccccagcgactcgaacgccgtgagcctcgtcatgcgccgcatcaggaaggaaaacgtcgatgccggcgaaagggcaaagcaggccctcgcgttcgagaggaccgatttcgaccaggtccgcagcctgatggagaacagcgacaggtgccaggacattaggaacctggcgttcctcggaattgcatacaacacgctcctcaggatcgcggaaattgcccgcattcgcgtgaaggacattagccgcaccgacggcggcaggatgcttatccacattggcaggaccaagacgctcgtttccaccgcaggcgtcgaaaaggccctcagcctcggagtgaccaagctcgtcgaacgctggatctccgtgtccggcgtcgcggacgacccaaacaactacctcttctgccgcgtccgcaagaacggggtggctgcccctagcgccaccagccaactcagcacgagggccttggaaggtattttcgaggccacccaccgcctgatctacggcgcgaaggatgacagcggtcaacgctacctcgcatggtccgggcactccgcccgcgttggagctgctagggacatggcccgcgccggtgtttccatccccgaaatcatgcaggcgggtggatggacgaacgtgaacattgtcatgaactacattcgcaaccttgacagcgagacgggcgcaatggttcgcctcctggaagatggtgactgaggtacccaacctagacttgtccatcttctggattggccaacttaattaatgtatgaaataaaaggatgcacacatagtgacatgctaatcactataatgtgggcatcaaagttgtgtgttatgtgtaattactagttatctgaataaaagagaaagagatcatccatatttcttatcctaaatgaatgtcacgtgtctttataattctttgatgaaccagatgcatttcattaaccaaatccatatacatataaatattaatcatatataattaatatcaattgggttagcaaaacaaatctagtctaggtgtgttttgcgatccgatatcgaattggccacggtaccagctgctgctgttctagggttcacaagtctgcctatttgtcttccccaatggagctatggttgtctggtctggtccttggtcgtgtcccgtttcattgtgtactatttacctgtaatgtgtatccttaagtctggtttgatggtgtctgaaacgttttgctgtggtagagcagcatggaagaactataatgaataagtgatccctaatcattgtgtccaaattttgcttctgctatacccttttgtgctgtttcttatgttttgcttaaaaatttgatctgacaaacaaatttgtctaaattatgctcttgttctgactgtgtactgtacacatttgtattgctaccggtttggcacatagttttctctttgattgcagatcaaacccttctgattgcagattgcttggctatggctgatgtgctcactgttcttctttagcttgtatattgctgatggtggcttggctacggctgaaaaagttgctgctgcgccgacttggcaactgttgctccagtaatgctttgtcctctcttcctagccgccgacttggcacttggcagctgttgctcctgtaatgcgttgttatctcttatctcttgagatgtactatgattttgaggctgtttgacttgtgccagattgccagtgctgatgctatattatctcaggtttttatgctagtatatgttttactgtgtgctgcctgtgtcgagttacgtaatctattgaaccgctatgcgtgttgatgccctgttgttgcttgccagattgatgcccctgttgcttgcagcttgcaagctgtagtgaaatcctaaaattccaaaccaaatctattctgaacttttgaagatctgtgatgtccggaagaaaagattcaaacagataaacgggactctccagaatctataaaataaatgatcgacaaacgctttgctttggtaggcttcaagcttggtcacccggtccgggcctagaaggccagcttcggccgccccgggcaactttattatacaaagttgatagataaatcagatatctggttcctaaggacccggcggaccgattaaactgattcggtccgacgcgttacctaataacttcgtatagcatacattatacgaagttattagctaactaactagtaagcgtacacctgagcggttaccgaattcctgcccttaaggccaattgttcaagattcattcaacaattgaaacatctcccatgattaaatcagtataaggttgctatggtcttgcttgacaaagtttttttttgagggaatttcaactaaatttttgagtgaaactatcaaatactgattttaaaaaatttttataaaaggaagcgcagagataaaaggccatctatgctacaaaagtacccaaaaatgtaatcctaaagtatgaattgcattttttttttgtttggacgaaaggaaaggagtattaccacaagaatgatatcatcttcatatttagatcttttttgggtaaagcttgagattctctaaatatagagaaatcagaagaaaaaaaaaccgtgttttggtggttttgatttctagcctccacaataactttgacggcgtcgacaagtctaacggacaccaagcagcgaaccaccagcgccgagccaagcgaagcagacggccgagacgttgacaccttcggcgcggcatctctcgagagttccgctccggcgctccacctccaccgctggcggtttcttattccgttccgttccgcctcctgctctgctcctctccacaccacacggcacgaaaccgttacggcaccggcagcacccagcacgggagaggggattcctttcccaccgttccttccctttccgccccgccgctataaatagccagccccatccccagcttttttccccaatctcatctcctctctcctgttgttcggagcacacgcacaatccgatcgatccccaaatccccttcgtctctcctcgcgagcctcgtggatcccagcttcaaggtacggcgatcgatcatcccccctccttctctctaccttcttttctctagactacatcggatggcgatccatggttagggcctgctagtttcccttcctgttttgtcgatggctgcgaggcacaatagatctgatggcgttatgacggctaacttgtcatgttgttgcgatttatagtccctttaggagatcagtttaatttctcggatggttcgagatcggtggtccatggttagtaccctaagatccgcgctgttagggttcgtagatggaggcgacctgttctgattgttaacttgtcagtacctgggaaatcctgggatggttctagctcgtccgcagatgagatcgatttcatgatcctctgtatcttgtttcgttgcctaggttccgtctaatctatccgtggtatgatgtagatgttttgatcgtgctaactacgtcttgtaaagttaattgtcaggtcataatttttagcatgcctttttttttgtttggttttgtctaattgggctgtcgttctagatcagagtagaagactgttccaaactacctgctggatttattgaacttggatctgtatgtgtgtcacatatcttcataaattcatgattaagatggattgaaatatcttttatctttttggtatggatagttctatatgttggtgtggctttgttagatgtatacatgcttagatacatgaagcaacgtgctgctactgtttagtaattgctgttcatttgtctaataaacagataaggatatgtatttatgttgctgttggttttgctggtactttgttggatacaaatgcttcaatacagaaaacagcatgctgctacgatttaccatttatctaatcttatcatatgtctaatctaataaacaaacatgcttttaaattatcttcatatgcttggatgatggcatacacagcggctatgtgtggttttttaaatacccagcatcatgggcatgcatgacactgctttaatatgctttttatttgcttgagactgtttcttttgtttatactgaccctttagttcggtgactcttctgcaggtcgactttaacttagcctaggatccatggcccagtccaagcacggcctgaccaaggagatgaccatgaagtaccgcatggagggctgcgtggacggccacaagttcgtgatcaccggcgagggcatcggctaccccttcaagggcaagcaggccatcaacctgtgcgtggtggagggcggccccttgcccttcgccgaggacatcttgtccgccgccttcatgtacggcaaccgcgtgttcaccgagtacccccaggacatcgtcgactacttcaagaactcctgccccgccggctacacctgggaccgctccttcctgttcgaggacggcgccgtgtgcatctgcaacgccgacatcaccgtgagcgtggaggagaactgcatgtaccacgagtccaagttctacggcgtgaacttccccgccgacggccccgtgatgaagaagatgaccgacaactgggagccctcctgcgagaagatcatccccgtgcccaagcagggcatcttgaagggcgacgtgagcatgtacctgctgctgaaggacggtggccgcttgcgctgccagttcgacaccgtgtacaaggccaagtccgtgccccgcaagatgcccgactggcacttcatccagcacaagctgacccgcgaggaccgcagcgacgccaagaaccagaagtggcacctgaccgagcacgccatcgcctccggctccgccttgccctccggactcagatctcgatagggtaccaatggccagttaacagatccagctgctgctgttctagggttcacaagtctgcctatttgtcttccccaatggagctatggttgtctggtctggtccttggtcgtgtcccgtttcattgtgtactatttacctgtaatgtgtatccttaagtctggtttgatggtgtctgaaacgttttgctgtggtagagcagcatggaagaactataatgaataagtgatccctaatcattgtgtccaaattttgcttctgctatacccttttgtgctgtttcttatgttttgcttaaaaatttgatctgacaaacaaatttgtctaaattatgctcttgttctgactgtgtactgtacacatttgtattgctaccggtttggcacatagttttctctttgattgcagatcaaacccttctgattgcagattgcttggctatggctgatgtgctcactgttcttctttagcttgtatattgctgatggtggcttggctacggctgaaaaagttgctgctgcgccgacttggcaactgttgctccagtaatgctttgtcctctcttcctagccgccgacttggcacttggcagctgttgctcctgtaatgcgttgttatctcttatctcttgagatgtactatgattttgaggctgtttgacttgtgccagattgccagtgctgatgctatattatctcaggtttttatgctagtatatgttttactgtgtgctgcctgtgtcgagttacgtaatctattgaaccgctatgcgtgttgatgccctgttgttgcttgccagattgatgcccctgttgcttgcagcttgcaagctgtagtgaaatcctaaaattcgaaaccaaatctattctgaacttttgaagatctgtgatgtccggaagaaaagattcaaacagataaacgggactctccagaatctataaaataaatgatcgacaaacgctttgctttggtaggcttcctagttagttagcggaccgaagcttcggtccgggcctgcggccgcagatatcagaacctgcgtctggacgcacaagtcatagcattatcggctaaaatttcttaatttctaaattagtcatatcggctaagaaagtggggagcactatcatttcgtagaacaagaacaaggtatcatatatatatatatatataatatttaaactttgttaagtggaatcaaagtgctagtattaatggagtttcatgtgcattaaattttatgtcacatcagcaattttgttgacttggcaaggtcatttagggtgtgtttggaagacaggggctattaggagtattaaacatagtctaattacaaaactaattgcacaaccgctaagctgaatcgcgagatggatctattaagcttaattagtccatgatttgacaatgtggtgctacaataaccatttgctaatgatggattacttaggtttaatagattcgtctcgtgatttagcctatgggttctgctattaattttgtaattagctcatatttagttcttataattagtatccgaacatccaatgtgacatgctaaagtttaaccctggtatccaaatgaagtcttatgagagtttcatcactccggtggtatatgtacttaggctccgttttcttccaccgacttatttttagcacccgtcacattgaatgtttagatactaattagaagtattaaacgtagactatttacaaaatccattacataagacgaatctaaacggcgagacgaatctattaaacctaattagtccatgatttgacaatgtgttgctacagtaaacatttgctaatgatggattaattaggcttaatagattcgtctcgccgtttagcctccacttatgtaatgggttttctaaacaatctacgtttaatactcctaattagtatctaaatattcaatgtgacacgtgctaaaaataagtcagtggaaggaagagaacgtccccttagttttccatcttattaattgtacgatgaaactgtgcagccagatgattgacaatcgcaatacttcaactagtgggccatgcacatcagcgacgtgtaacgtcgtgagttgctgttcccgtagagaaatatcaactggtgggccacgcacatcagcgtcgtgtaacgtggacggaggagccccgtgacggcgtcgacatcgaacggccaccaaccacggaaccacccgtccccacctctcggaagctccgctccacggcgtcgacatctaacggctaccagcaggcgtacgggttggagtggactccttgcctctttgcgctggcggcttccggaaattgcgtggcggagacgaggcgggctcgtctcacacggcacggaagacgtcacgggttccttccccacctctcctcttccccaccgccataaatagccgaccccctcgcctttctccccaatctcatctcgtctcgtgttgttcggagcacaccacccgccccaaatcgttcttcccgcaagcctcggcgatccttcacccgcttcaaggtacggcgatcgtcttcctcctctagatcggcgtgatctgcaagtagttgatttggtagatggttaggatctgtgcactgaagaaatcatgttagatccgcgatgtttctgttcgtagatggctgggaggtggaatttttgtgtagatctgatatgttctcctgtttatcttgtcacgctcctgcgatttgtggggattttaggtcgttgatctgggaatcgtggggttgcttctaggctgttcgtagatgaggtcgttctcacggtttactggatcattgcctagtagatcagctcgggctttcgtctttgtatatggtgcccatacttgcatctatgatctggttccgtggtgttacctaggtttctgcgcctgattcgtccgatcgattttgttagcatgtggtaaacgtttggtcatggtctgatttagattagagtcgaataggatgatctcgatctagctcttgggattaatatgcatgtgtcaccaatctgttccgtggttaagatgatgaatctatgcttagttaatgggtgtagatatatatgctgctgttcctcaatgatgccgtagcttttacctgagcagcatggatcgtcctgttacttaggtagatgcacatgcttatagatcaagatatgtactgctactgttggaattctttagtatacctgatgatcatccatgctcttgttacttgttttggtatacttggatgatggcatgctgctgctttttgttgatttgagcccatccatatctgcatatgtcacatgattaagatgattacgctgtttctgtatgatgccatagcttttatgtgagcaacatgcatcctcctggttatatgcattaatagatggaagatatctattgctacaatttgatgattattttgtacatacgatgatcaagcatgctcttcatactttgttgatatacttggataatgaaatgctgctgcacgttcattctatagcactaatgatgtgatgaacacgcacgacctgtttgtggcatctgtttgaatgtgttgttgctgttcactagagactgttttattaacctactgctagatacttacccttctgtctgtttattcttttgcagccagaatagcggatccgcccatggtcgaacaggacggcctgcatgcaggatcaccagcggcctgggtcgaaagactcttcggctacgactgggcacaacagaccatcgggtgtagcgacgcagctgttttcaggctgtccgcacagggcagacccgttttgttcgtcaaaacagacctgtctggcgcgctcaacgaactgcaagacgaggccgcaagactgagctggcttgctaccacaggcgttccttgtgctgcagtcctcgacgtcgttactgaggctggaagagactggctgctcctgggtgaagtcccaggacaggaccttttgtccagccatctggcacctgccgaaaaggtcagcatcatggcagacgccatgagaaggctgcacacactcgaccctgcaacatgccccttcgatcaccaggcaaaacacaggatcgagcgcgcaagaacgcgcatggaggctggtttggtcgaccaagatgacctcgacgaggaacaccaaggactggctcctgctgaactcttcgccagactcaaggcgagaatgccagacggtgacgacctggtcgtcacacacggcgacgcttgtctcccaaacataatggtcgagaacggacgcttcagcggtttcatcgactgcggtagactcggagtcgctgacagataccaggacatcgccctggcaacacgcgacatcgcagaggaactcggaggcgaatgggctgacaggtttctcgtgctctacggtatcgctgctccagacagccagaggatcgcattctacaggctcctcgacgagttcttttagttcgaacggtacccggggatcctctagtgccgtgggtcgtttaagctgccgctgtacctgtgtcgtctggtgccttctggtgtacctgggaggttgtcgtctatcaagtatctgtggttggtgtcatgagtcagtgagtcccaatactgttcgtgtcctgtgtgcattatacccaaaactgttatgggcaaatcatgaataagcttgatgttcgaacttaaaagtctctgctcaatatggtattatggttgtttttgttcgtctcctaatatttgcctgggatcaaattttattggctggtgttcatttgacctccatgttcttgctaggctccattttttactctacagccataatatgtttgattgtttggtttgttctttgttgtacacctggttctgtcgagcttagttttcgacactggcttacagcttaacatgttgctattttattgggttctgattgctattttattgggttctgattgctagtttttgctgaatccaaaaaccatgttatttatttaagcgatccaggttattattatgatggtggctaagtttttttttttccaagggtaaattttctggattctccagtgtttctgtggccgaattcaatcactagagtcgacctgcatgattccgatgacttcgtaggttcctagctcaagccgctcgtgtccaagcgtcacttacgattagctaatgattacggcatctaggaccgactagctagctagctaagagctcggtaccgagctcgaattcattccgattaatcgtggcctcttgctcttcaggatgaagagctatgtttaaacgtgcaagcgctactagacaattcagtacattaaaaacgtccgcaatgtgttattaagttgtctaagcgtcaatttgtttacaccacaatatatcctgccaccagccagccaacagctccccgaccggcagctcggcacaaaatcaccactcgatacaggcagcccatcagtccgggacggcgtcagcgggagagccgttgtaaggcggcagactttgctcatgttaccgatgctattcggaagaacggcaactaagctgccgggtttgaaacacggatgatctcgcggagggtagcatgttgattgtaacgatgacagagcgttgctgcctgtgatcaaatatcatctccctcgcagagatccgaattatcagccttcttattcatttctcgcttaaccgtgacaggctgtcgatcttgagaactatgccgacataataggaaatcgctggataaagccgctgaggaagctgagtggcgctatttctttagaagtgaacgttgacgatcgtcgggcccaggtagaatccgcctgagtcgcaagggtgacttcgcctatattggacgacggcgcgcagagggcgacctctttttgggttacgattgtaggattatcactaaaacaatacatgaacatattcaaatggcaatctctctaaggcattggaaataaatacaaataacagttgggtggagtttttcgacctgtgggcgttaaccttctgttaacctaaaagctcttgcccaaacagcagaatcggcgctaattgccagcggcggaacttttccagtttcgcgaaaaatatcgccactggcaaggaatgggtttgagatggcgaagtctgtcctaaaagcagcgcctgtagttgtagggttgacggccttgatggagcgtcatgccgatgccctctcgagccaacttcaagcacatcatcttaaggttttcccgccgcattccgagaagggcattcgaacattcgggccatcggaggcgtccaagctgctcggcgttggcgagtcatatttacggcagaccgcgtctgagatgccagagttgaatgttagcatgagcccgggtggcaggcgaatgttctcaattgaagatatccatgcgattcggaagtatatggatcaggtcggccgcgggaaccggcgctacctgccacatcgtcgaggcggcgagcagcttcaggttatctctgtgatgaatttcaaaggtgggtcgggtaagaccaccaccgccgcgcatctggcgcagtacctcgctatgcgcggatatcgagtcttggccattgatctcgatcctcaagcgagcctttctgcactctttgggagccaaccggagacggacgttggcccgaacgaaacgctctacggcgctataaggtatgatgatgagcaggtggcaatcgaacgagtcgtccgagggacttacattcccgacctccacctgattcctggtaatcttgagctgatggagtttgaacacgatacgccacgcgcgctgatgaaccgcaaagagggcgacacgctcttttatggtcgcatcagccaagtaattgaagatatcgcggataactatgacgtcgtggtcatcgactgccctccccagcttgggtatctcacgctatccgcattgactgcggcgacgtccattcttgtcacggtccatccgcagatgctggatgtgatgtcgatgaaccagtttctggcaatgacatcgaaccttttgcgtgaaatcgagaatgctggcgccaagttcaagtttaattggatgcgctatctgataacccgtttcgaaccgagcgacggaccacagaaccaaatggtaggttatctgcggtcgatttttggcgaaaatgtcctcaattttccgatgcttaaaaccaccgcggtttcggacgctggcctgacaaaccagactctattcgaagtggagcgtggcctgttcacgcgctcgacctatgatcgagccttggaggcgatgaacgccgtcaacgacgagatcgaaacactgatcaaaaaagcatggggtaggcccacatgagccggaagcacatccttggcgtctcaactgacgcccctgagacgtcgcccgccgacaataggacggcaaagaaccgctccatgccgctcctcggcgtaacaaggaaggagcgcgatccggcaacgaagctcacagcgaacattggtaacgcactgcgagagcaaaacgatcgtcttagccgtgccgaagagatcgagcggcgtctcgctgaaggtcaggcagtgatagagttggatgcctcgtcaatagaaccgtctttcgtgcaggatcgtatgcgaggggacattgacgggctccttacttcgatccgggaacaaggacagcaagtcccaatccttgtgcgaccgcatccgagccagccgggccgatatcaggttgccttcggccaccgccggctacgcgccgtttcagaactcggacttccggtcagagcggtcgttcgcgaactgacggacgagcaagtggtcgtagcacagggtcaggaaaacaatgagcgcgaagatcttaccttcatcgaaaaggcgcgcttcgcacatcgcctgaacaggcagttttctcgagagattgtcatcgccgcgatgtcgatcgacaagagcaatttgtccaagatgcttctgctcgttgacgccctcccctctgaactgaccgatgctattggtgccgctcctggtgttggacggccgagttggcaacaacttgccgagctgattgagaaagtttcttcaccggccgacgtggctaaatatgctatgtcggaggaagttcaagcgctgccatcggcagaacgattcaaggcggtgatcgctagtctgaagcccagtcgggttgcgcgtggacttcccgaggtcatggccaccccagacggcaccagaattgcacaggtgacgcagagcaaggccaaactggaaatcacgattgacaggaaggcgacgcccgattttgcgaccttcgtgctcgatcatgtgccagcgctgtatcaagcgtaccacgctgagaaccaacggaaacggggagagtaaaccgcaaaagaaaagagccccctcaacgtcgccgtcgcggaagcccttctgtctctctagcgcgaacagaatcgcatttcctcgaatcctcgtcaagagtttttagcgccgttttggtgagctgatttcctttgcctgctgaaaggtgaaagatgatgcagacaggaagtgtaacgacgccattcgggcggcggccaatgacgcttgcgcttgtgcggcgccagacggcgctggccgatatcaaacaaggcaagacagcggacaagtggaaggtctttagagacgcgtccgcggctatggaactacttggaatccagtccaacagtcttgccgtccttgatgcgctattgagctttcacccggaaacggagttgcgtcaggaggcacagctgatcgtcttcccgtcgaatgctcagcttgcccttcgggcgcatgggatggctggcgcgactttgcgtaggcacatcgccatgctcgtggagtcaggcttgatcgtccggaaggatagcgccaacggaaagcgttacgctcgtaaggatggcgctggtcagatcgagcgcgcgtttggcttcgatttgtctccgcttctcgcgcggtcggaagagctagcgatgatggcacagcaggtgatggccgatcgagcagcattcaggatggccaaagaaagtctgacgatttgccgacgggacgttcggaagctaattacggcagctatggaagagggagcggagggcgactggcaagctgtcgaggaagtctatgtggaacttgtgggtagaattccacgcgccccgacgcttgctgatgtagagtcaattctcgaagagatgtggatgctccaggaagagataatcaaccggttggaaattagagacaattcagaaaataatagcaccaatgctgcccagagcgagcagcacatacagaattcaaaacccgaatccgttaatgaacttgaacctcgctctgaaaaggagcagggcgctaagccgagtgaaatagaccgggcaaggagcgagccgataaaagcgttccccctcgggatgatcctgaaagcatgcccgaccattggcaactatgggccgagcggtgcggttgctagctggcgtgacctcatgtcggctgcggtggtggttcggtctatgctgggggtcagcccgtcggcttaccaagacgcgtgtgaggcaatgggaccggagaatgcggcagcagcgatggcgtgcattttggagcgagcgaacttcatcaattcgcccgggggctatctccgagatctgacacggcggagcgagcttgggaagttttcacttggcccgatgataatggcgctcttgaaggctagcgggcaggggacgttgcggtttggctagaattagcgagtatggagcaggatggtctgtggtcagctgaccacagacctaataggttgaaaacatgagcgttttttggatgatcgacagaccatccgattcccggagtaccaagcgtgctctgatgggagcgataacattactcaacaagcacgaaggccccatgccgatcgttgatcgtgaaggagagcctgctctacatgcggcggtattttgccggccgaggcatgtagtcgcggagcactgcctatttactgccgtgccacctgggtccttttcatcacgtgctataaaaataattataatttaaattttttaatataaatatataaattaaaaatagaaagtaaaaaaagaaattaaagaaaaaatagtttttgttttccgaagatgtaaaagactctagggggatcgccaacaaatactaccttttatcttgctcttcctgctctcaggtattaatgccgaattgtttcatcttgtctgtgtagaagaccacacacgaaaatcctgtgattttacattttacttatcgttaatcgaatgtatatctatttaatctgcttttcttgtctaataaatatatatgtaaagtacgctttttgttgaaattttttaaacctttgtttatttttttttcttcattccgtaactcttctaccttctttatttactttctaaaatccaaatacaaaacataaaaataaataaacacagagtaaattcccaaattattccatcattaaaagatacgaggcgcgtgtaagttacaggcaagcgatccgtcctaagaaaccattattatcatgacattaacctataaaaataggcgtatcacgaggccctttcgtctcgcgcgtttcggtgatgacggtgaaaacctctgacacatgcagctcccggagacggtcacagcttgtctgtaagcggatgccgggagcagacaagcccgtcagggcgcgtcagcgggtgttggcgggtgtcggggctggcttaactatgcggcatcagagcagattgtactgagagtgcaccataccacagcttttcaattcaattcatcattttttttttattcttttttttgatttcggtttctttgaaatttttttgattcggtaatctccgaacagaaggaagaacgaaggaaggagcacagacttagattggtatatatacgcatatgtagtgttgaagaaacatgaaattgcccagtattcttaacccaactgcacagaacaaaaacctgcaggaaacgaagataaatcatgtcgaaagctacatataaggaacgtgctgctactcatcctagtcctgttgctgccaagctatttaatatcatgcacgaaaagcaaacaaacttgtgtgcttcattggatgttcgtaccaccaaggaattactggagttagttgaagcattaggtcccaaaatttgtttactaaaaacacatgtggatatcttgactgatttttccatggagggcacagttaagccgctaaaggcattatccgccaagtacaattttttactcttcgaagacagaaaatttgctgacattggtaatacagtcaaattgcagtactctgcgggtgtatacagaatagcagaatgggcagacattacgaatgcacacggtgtggtgggcccaggtattgttagcggtttgaagcaggcggcagaagaagtaacaaaggaacctagaggccttttgatgttagcagaattgtcatgcaagggctccctatctactggagaatatactaagggtactgttgacattgcgaagagcgacaaagattttgttatcggctttattgctcaaagagacatgggtggaagagatgaaggttacgattggttgattatgacacccggtgtgggtttagatgacaagggagacgcattgggtcaacagtatagaaccgtggatgatgtggtctctacaggatctgacattattattgttggaagaggactatttgcaaagggaagggatgctaaggtagagggtgaacgttacagaaaagcaggctgggaagcatatttgagaagatgcggccagcaaaactaaaaaactgtattataagtaaactaggcacaaacgttgactcttggatcgagctggcagacaaagcaataacccacacagaggacgattaatggctgacgaagagatccagaatccgccggacggtactgctgctgccgaagttgagccggctgctcctagaggtagaagagcaaagaaagcaccagccgaaacagcccgcacgggatcgttcaaatccgtgaagccgaaaacccgcggcctcagcaaccgagaaaaactggagaagatcggtcaaatcgaagctcaggtcgctggcggcgcaaccttgaaggacgccgttaagatcgtgggtatttccgttcagacctattatcaatggaagagagctgcggttcaacctgtctcacagaatccggccgtgtctgtttcagttgacgatgaactcggcgagttcatccaactcgaggaggaaaatatgcatggcatgcccgttccatacagaagctgggcgaacaaacgatgctcgccttccagaaaaccgaggatgcgaaccacttcatccggggtcagcaccaccggcaagcgccgcgacggccgaggtcttccgatctcctgaagccagggcagatccgtgcacagcaccttgccgtagaagaacagcaaggccgccaatgcctgacgatgcgtggagaccgaaaccttgcgctcgttcgccagccaggacagaaatgcctcgacttcgctgctgcccaaggttgccgggtgacgcacaccgtggaaacggatgaaggcacgaacccagtggacataagcctgttcggttcgtaagctgtaatgcaagtagcgtatgcgctcacgcaactggtccagaaccttgaccgaacgcagcggtggtaacggcgcagtggcggttttcatggcttgttatgactgtttttttggggtacagtctatgcctcgggcatccaagcagcaagcgcgttacgccgtgggtcgatgtttgatgttatggagcagcaacgatgttacgcagcagggcagtcgccctaaaacaaagttaaacatcatgagggaagcggtgatcgccgaagtatcgactcaactatcagaggtagttggcgtcatcgagcgccatctcgaaccgacgttgctggccgtacatttgtacggctccgcagtggatggcggcctgaagccacacagtgatattgatttgctggttacggtgacggtaaggcttgatgaaacaacgcggcgagctttgatcaacgaccttttggaaacttcggcttcccctggagagagcgagattctccgcgctgtagaagtcaccattgttgtgcacgacgacatcattccgtggcgttatccagctaagcgcgaactgcaatttggagaatggcagcgcaatgacattcttgcaggtatcttcgagccagccacgatcgacattgatctggctatcttgctgacaaaagcaagagaacatagcgttgccttggtaggtccagcggcggaggaactctttgatccggttcctgaacaggatctatttgaggcgctaaatgaaaccttaacgctatggaactcgccgcccgactgggctggcgatgagcgaaatgtagtgcttacgttgtcccgcatttggtacagcgcagtaaccggcaaaatcgcgccgaaggatgtcgctgccgactgggcaatggagcgcctgccggcccagtatcagcccgtcatacttgaagctagacaggcttatcttggacaagaagaagatcgcttggcctcgcgcgcagatcagttggaagaatttgtccactacgtgaaaggcgagatcaccaaggtagtcggcaaataatgtctaacaattcgttcaagccgacgccgcttcgcggcgcggcttaactcaagcgttagatgcactatacctcatatatactttagattgatttaaaacttcatttttaatttaaaaggatctaggtgaagatcctttttgataatctcatgaccaaaatcccttaacgtgagttttcgttccactgagcgtcagaccccgtagaaaagatcaaaggatcttcttgagatcctttttttctgcgcgtaatctgctgcttgcaaacaaaaaaaccaccgctaccagcggtggtttgtttgccggatcaagagctaccaactctttttccgaaggtaactggcttcagcagagcgcagataccaaatactgtccttctagtgtagccgtagttaggccaccacttcaagaactctgtagcaccgcctacatacctcgctctgctaatcctgttaccagtggctgctgccagtggcgataagtcgtgtcttaccgggttggactcaagacgatagttaccggataaggcgcagcggtcgggctgaacggggggttcgtgcacacagcccagcttggagcgaacgacctacaccgaactgagatacctacagcgtgagctatgagaaagcgccacgcttcccgaagggagaaaggcggacaggtatccggtaagcggcagggtcggaacaggagagcgcacgagggagcttccagggggaaacgcctggtatctttatagtcctgtcgggtttcgccacctctgacttgagcgtcgatttttgtgatgctcgtcaggggggcggagcctatggaaaaacgccagcaacgcggcctttttacggttcctggccttttgctggccttttgctcacatgttctttcctgcgttatcccctgattctgtggataaccgtattaccgcctttgagtgagctgataccgctcgccgcagccgaacgaccgagcgcagcgagtcagtgagcgaggaagcggaagagcgcctgatccatccagctgatatcccctaggttgaacagaagtcattatcgcacggaatgccaagcactcccgaggggaaccctgtggttggcatgcacatacaaatggacgaacggat

SEQ ID NO: 353 - DNA, 2133 bp, synthetic construct
  source 1..2133: mol_type = other DNA
atggccactgtgaacaactggctcgctttctccctctccccgcaggagctgccgccctcccagacgacggactccacactcatctcggccgccaccgccgaccatgtctccggcgatgtctgcttcaacatcccccaagattggagcatgaggggatcagagctttcggcgctcgtcgcggagccgaagctggaggacttcctcggcggcatctccttctccgagcagcatcacaaggccaactgcaacatgatacccagcactagcagcacagtttgctacgcgagctcaggtgctagcaccggctaccatcaccagctgtaccaccagcccaccagctcagcgctccacttcgcggactccgtaatggtggcttcctcggccggtgtccacgacggcggtgccatgctcagcgcggccgccgctaacggtgtcgctggcgctgccagtgccaacggcggcggcatcgggctgtccatgattaagaactggctgcggagccaaccggcgcccatgcagccgagggtggcggcggctgagggcgcgcaggggctctctttgtccatgaacatggcggggacgacccaaggcgctgctggcatgccacttctcgctggagagcgcgcacgggcgcccgagagtgtatcgacgtcagcacagggtggagccgtcgtcgtcacggcgccgaaggaggatagcggtggcagcggtgttgccggcgctctagtagccgtgagcacggacacgggtggcagcggcggcgcgtcggctgacaacacggcaaggaagacggtggacacgttcgggcagcgcacgtcgatttaccgtggcgtgacaaggcatagatggactgggagatatgaggcacatctttgggataacagttgcagaagggaagggcaaactcgtaagggtcgtcaagtctatttaggtggctatgataaagaggagaaagctgctagggcttatgatcttgctgctctgaagtactggggtgccacaacaacaacaaattttccagtgagtaactacgaaaaggagctcgaggacatgaagcacatgacaaggcaggagtttgtagcgtctctgagaaggaagagcagtggtttctccagaggtgcatccatttacaggggagtgactaggcatcaccaacatggaagatggcaagcacggattggacgagttgcagggaacaaggatctttacttgggcaccttcagcacccaggaggaggcagcggaggcgtacgacatcgcggcgatcaagttccgcggcctcaacgccgtcaccaacttcgacatgagccgctacgacgtgaagagcatcctggacagcagcgccctccccatcggcagcgccgccaagcgcctcaaggaggccgaggccgcagcgtccgcgcagcaccaccacgccggcgtggtgagctacgacgtcggccgcatcgcctcgcagctcggcgacggcggagccctggcggcggcgtacggcgcgcactaccacggcgccgcctggccgaccatcgcgttccagccgggcgccgccagcacaggcctgtaccacccgtacgcgcagcagccaatgcgcggcggcgggtggtgcaagcaggagcaggaccacgcggtgatcgcggccgcgcacagcctgcaggacctccaccacctgaacctgggcgcggccggcgcgcacgactttttctcggcagggcagcaggccgccgccgctgcgatgcacggcctgggtagcatcgacagtgcgtcgctcgagcacagcaccggctccaactccgtcgtctacaacggcggggtcggcgacagcaacggcgccagcgccgtcggcggcagtggcggtggctacatgatgccgatgagcgctgccggagcaaccactacatcggcaatggtgagccacgagcaggtgcatgcacgggcctacgacgaagccaagcaggctgctcagatggggtacgagagctacctggtgaacgcggagaacaatggtggcggaaggatgtctgcatgggggactgtcgtgtctgcagccgcggcggcagcagcaagcagcaacgacaacatggccgccgacgtcgggcatggcggcgcgcagctcttcagtgtctggaacgacacttaa
